(19) United States
(12) Patent Application Publication
(10) Pub. No.: US 2011/0236972 A1
(43) Pub. Date: Sep. 29, 2011

(54) NUCLEIC ACID COMPOUNDS FOR INHIBITING BIRC5 GENE EXPRESSION AND USES THEREOF

(75) Inventors: Steven C. Quay, Seattle, WA (US); James McSwiggen, Boulder, CO (US); Narendra K. Vaish, Kirkland, WA (US); Kathy L. Fosnaugh, Bellevue, WA (US); Shaguna Seth, Bothell, WA (US)

(73) Assignee: MARINA BIOTECH, INC., Bothell, WA (US)

(21) Appl. No.: 13/057,741

(22) PCT Filed: Aug. 5, 2009
(86) PCT No.: PCT/US09/52878

§ 371 Date: Jun. 21, 2011

Related U.S. Application Data
(60) Provisional application No. 61/086,435, filed on Aug. 5, 2008.

(51) Int. Cl. C12N 5/071; C07H 21/02

(52) U.S. Cl. 435/366; 536/24.5; 435/375

(57) ABSTRACT

The present disclosure provides RNA molecules, for example, meroduplex ribonucleic acid molecules (mdRNA), capable of decreasing or silencing BIRC5 gene expression. An mdRNA of this disclosure comprises at least three strands that combine to form at least two non-overlapping double-stranded regions separated by a nick or gap wherein one strand is complementary to a BIRC5 mRNA. Also provided are methods of decreasing expression of a BIRC5 gene in a cell or in a subject to treat a BIRC5-related disease.

### TECHNICAL FIELD

[0001] The present disclosure relates generally to compounds for use in treating disease by gene silencing and, more specifically, to a nicked or gapped double-stranded RNA (dsRNA) comprising at least three strands that decreases expression of a survivin (BIRC5) gene, and to uses of such dsRNA to treat or prevent cancer associated with inappropriate BIRC5 gene expression.

### BACKGROUND

[0002] RNA interference (RNAi) refers to the cellular process of sequence specific, post-transcriptional gene silencing in animals mediated by small inhibitory nucleic acid molecules, such as a double-stranded RNA (dsRNA) that is homologous to a portion of a targeted messenger RNA (Fire et al., Nature 391:806, 1998; Hamilton et al., Science 286:950-951, 1999). RNAi has been observed in a variety of organisms, including mammalians (Fire et al., Nature 391:806, 1998; Bahramian and Zarbl, Mol. Cell. Biol. 19:274-283, 1999; Wianny and Goetz, Nature Cell Biol. 2:70, 1999). RNAi can be induced by introducing an exogenous synthetic 21-nucleotide RNA duplex into cultured mammalian cells (Elbashir et al., Nature 411:494, 2001a).

[0003] The mechanism by which dsRNA mediates targeted gene-silencing can be described as involving two steps. The first step involves degradation of long dsRNAs by a ribonuclease III-like enzyme, referred to as Dicer, into short interfering RNAs (siRNAs) having from 21 to 23 nucleotides with double-stranded regions of about 19 base pairs and a two nucleotide, generally, overhang at each 3′-end (Berstein et al., Nature 409:363, 2001; Elbashir et al., Genes Dev. 15:188, 2001b; and Kim et al., Nature Biotech. 23:222, 2005). The second step of RNAi gene-silencing involves activation of a multi-component nuclease having one strand (guide or antisense strand) from the siRNA and an Argonaute protein to form an RNA-induced silencing complex (“RISC”) (Elbashir et al., Genes Dev. 15:188, 2001). Argonaute initially associates with a double-stranded siRNA and then endonucleolytically cleaves the non-incorporated strand (passenger or sense strand) to facilitate its release due to resulting thermodynamic instability of the cleaved duplex (Leuschner et al., EMBO 7:314, 2006). The guide strand in the activated RISC binds to a complementary target mRNA, which is then cleaved by the RISC to promote gene silencing. Cleavage of the target RNA occurs in the middle of the target region that is complementary to the guide strand (Elbashir et al., 2001b).

[0004] There continues to be a need for alternative effective therapeutic modalities useful for treating or preventing BIRC5-associated diseases or disorders in which reduced BIRC5 gene expression (gene silencing) would be beneficial. The present disclosure meets such needs, and further provides other related advantages.

### BRIEF SUMMARY

[0005] Briefly, the present disclosure provides nicked or gapped double-stranded RNA (dsRNA) comprising at least three strands that is suitable as a substrate for Dicer or as a RISC activator to modify expression of survivin (BIRC5) messenger RNA (mRNA).

[0006] In one aspect, the instant disclosure provides a meroduplex mdRNA molecule, comprising a first strand that is complementary to a human BIRC5 mRNA as set forth in SEQ ID NOs:1158, 1159 or 1160(corresponding to BIRC5 variants 3, 2 and 1, respectively), and a second strand and a third strand that are each complementary to non-overlapping regions of the first strand, wherein the second strand and third strands can anneal with the first strand to form at least two double-stranded regions spaced apart by up to 10 nucleotides and thereby forming a gap between the second and third strands, and wherein (a) the mdRNA molecule optionally includes at least one double-stranded region of 5 base pairs to 13 base pairs, or (b) the double-stranded regions combined total about 15 base pairs to about 40 base pairs and the mdRNA molecule optionally has blunt ends. In certain embodiments, the first strand is about 15 to about 40 nucleotides in length, and the second and third strands are each, individually, about 5 to about 20 nucleotides, wherein the combined length of the second and third strands is about 15 nucleotides to about 40 nucleotides. In other embodiments, the first strand is about 15 to about 40 nucleotides in length and is complementary to at least about 15, 16, 17, 18, 19, 20, 21, 22, 23, 24, 25, 26, 27, 28, 29, 30, 31, 32, 33, 34, 35, 36, 37, 38, 39, or 40 contiguous nucleotides of a human BIRC5 mRNA as set forth in SEQ ID NO: 1158, 1159 or 1160. In still further embodiments, the first strand is about 15 to about 40 nucleotides in length and is at least about 70%, 75%, 80%, 85%, 90%, 95%, 96%, 97%, 98%, or 99% identical to a sequence that is complementary to at least about 15, 16, 17, 18, 19, 20, 21, 22, 23, 24, 25, 26, 27, 28, 29, 30, 31, 32, 33, 34, 35, 36, 37, 38, 39, or 40 contiguous nucleotides of a human BIRC5 mRNA as set forth in SEQ ID NO: 1158, 1159 or 1160.

[0007] In other embodiments, the mdRNA is a RISC activator (e.g., the first strand has about 15 nucleotides to about 25 nucleotides) or a Dicer substrate (e.g., the first strand has about 26 nucleotides to about 40 nucleotides). In some embodiments, the gap comprises at least one to ten unpaired nucleotides in the first strand positioned between the double-stranded regions formed by the second and third strands when annealed to the first strand, or the gap is a nick. In certain embodiments, the nick or gap is located 10 nucleotides from the 5′-end of the first (antisense) strand or at the Argonaute cleavage site. In another embodiment, the meroduplex nick or gap is positioned such that the thermal stability is maximized for the first and second strand duplex and for the first and third strand duplex as compared to the thermal stability of such meroduplexes having a nick or gap in a different position.

[0008] In another aspect, the instant disclosure provides an mdRNA molecule having a first strand that is complementary to human BIRC5 mRNA as set forth in SEQ ID NO: 1158, 1159 or 1160, and a second strand and a third strand that is each complementary to non-overlapping regions of the first strand, wherein the second strand and third strand can anneal with the first strand to form at least two double-stranded regions spaced apart by up to 10 nucleotides and thereby forming a gap between the second and third strands, and wherein (a) the mdRNA molecule optionally includes at least one double-stranded region of 5 base pairs to 13 base pairs, or (b) the double-stranded regions combined total about 15 base pairs to about 40 base pairs and the mdRNA molecule optionally has blunt ends;

[0009] and wherein at least one pyrimidine of the mdRNA comprises a pyrimidine nucleoside according to Formula I or II:

[chemical structure]

wherein R¹ and R² are each independently a —H, —OH, —OCH₃, —OCH₂OCH₂CH₃, —OCH₂CH₂OCH₃, halogen, substituted or unsubstituted C₁-C₁₀ alkyl, alkoxy, alkoxyalkyl, hydroxyalkyl, carboxyalkyl, alkylsulfonylamino, aminoalkyl, dialkylamino, alkylaminoalkyl, dialkylaminoalkyl, haloalkyl, trifluoromethyl, cycloalkyl, (cycloalkyl)alkyl, substituted or unsubstituted C₂-C₁₀ alkenyl, substituted or unsubstituted —O-allyl, —O—CH₂CH═CH₂, —O—CH═CHCH₃, substituted or unsubstituted C₂-C₁₀ alkynyl, carbamoyl, carbamyl, carboxy, carbonylamino, substituted or unsubstituted aryl, substituted or unsubstituted aralkyl, —NH₂, —NO₂, —CN, or heterocyclo group; R³ and R⁴ are each independently a hydroxyl, a protected hydroxyl, a phosphate, or an internucleoside linking group; and R⁵ and R⁸ are independently O or S. In certain embodiments, at least one nucleoside is according to Formula I in which R¹ is methyl and R² is —OH. In certain related embodiments, at least one uridine of the dsRNA molecule is replaced with a nucleoside according to Formula I in which R¹ is methyl and R² is —OH, or R¹ is methyl, R² is —OH, and R⁸ is S. In some embodiments, the at least one R¹ is a C₁-C₅ alkyl, such as methyl. In some embodiments, at least one R² is selected from 2′-O—(C₁-C₅)alkyl, 2′-O-methyl, 2′-OCH₂OCH₂CH₃, 2′-OCH₂CH₂OCH₃, 2′-O-allyl, or fluoro. In some embodiments, at least one pyrimidine nucleoside of the mdRNA molecule is a locked nucleic acid (LNA) in the form of a bicyclic sugar, wherein R² is oxygen, and the 2′-O and 4′-C form an oxymethylene bridge on the same ribose ring (e.g., a 5-methyluridine LNA) or is a G clamp. In other embodiments, one or more of the nucleosides are according to Formula I in which R¹ is methyl and R² is a 2′-O—(C₁-C₅)alkyl, such as 2′-O-methyl. In some embodiments, the gap comprises at least one unpaired nucleotide in the first strand positioned between the double-stranded regions formed by the second and third strands when annealed to the first strand, or the gap is a nick. In certain embodiments, the nick or gap is located 10 nucleotides from the 5′-end of the first strand or at the Argonaute cleavage site. In another embodiment, the meroduplex nick or gap is positioned such that the thermal stability is maximized for the first and second strand duplex and for the first and third strand duplex as compared to the thermal stability of such meroduplexes having a nick or gap in a different position. In still another aspect, the instant disclosure provides a method for reducing the expression of a human BIRC5 gene in a cell, comprising administering an mdRNA molecule to a cell expressing a BIRC5 gene, wherein the mdRNA molecule is capable of specifically binding to a BIRC5 mRNA and thereby reducing the gene's level of expression in the cell. In a related aspect, there is provided a method of treating or preventing a disease associated with BIRC5 expression in a subject by administering an mdRNA molecule of this disclosure. In certain embodiments, the cell or subject is human. In certain embodiments, the disease is cancer including bladder cancer, hepatocellular carcinoma (HCC), NSCLC (lung nonsmall cell lung cancer), melanoma, leukemia, colon cancer, postate cancer, breast cancer, ovarian cancer, glioblastoma, and ovarian cancer.

[0010] In any of the aspects of this disclosure, some embodiments provide an mdRNA molecule having a 5-methyluridine (ribothymidine), a 2-thioribothymidine, or 2′-O-methyl-5-methyluridine in place of at least one uridine on the first, second, or third strand, or in place of each and every uridine on the first, second, or third strand. In further embodiments, the mdRNA further comprises one or more non-standard nucleoside, such as a deoxyuridine, locked nucleic acid (LNA) molecule, or a universal-binding nucleotide, or a G clamp. Exemplary universal-binding nucleotides include C-phenyl, C-naphthyl, inosine, azole carboxamide, 1-β-D-ribofuranosyl-4-nitroindole, 1-β-D-ribofuranosyl-5-nitroindole, 1-β-D-ribofuranosyl-6-nitroindole, or 1-β-D-ribofuranosyl-3-nitropyrrole. In some embodiments, the mdRNA molecule further comprises a 2′-sugar substitution, such as a 2′-O-methyl, 2′-O-methoxyethyl, 2′-O-2-methoxyethyl, 2′-O-allyl, or halogen (e.g., 2′-fluoro). In certain embodiments, the mdRNA molecule further comprises a terminal cap substituent on one or both ends of one or more of the first strand, second strand, or third strand, such as independently an alkyl, abasic, deoxy abasic, glyceryl, dinucleotide, acyclic nucleotide, or inverted deoxynucleotide moiety. In other embodiments, the mdRNA molecule further comprises at least one modified internucleoside linkage, such as independently a phosphorothioate, chiral phosphorothioate, phosphorodithioate, phosphotriester, aminoalkylphosphotriester, methyl phosphonate, alkyl phosphonate, 3′-alkylene phosphonate, 5′-alkylene phosphonate, chiral phosphonate, phosphonoacetate, thiophosphonoacetate, phosphinate, phosphoramidate, 3′-amino phosphoramidate, aminoalkylphosphoramidate, thionophosphoramidate, thionoalkylphosphonate, thionoalkylphosphotriester, selenophosphate, or boranophosphate linkage.

[0011] In any of the aspects of this disclosure, some embodiments provide an mdRNA comprising an overhang of one to four nucleotides on at least one 3′-end that is not part of the gap, such as at least one deoxyribonucleotide or two deoxyribonucleotides (e.g., thymidine). In some embodiments, at least one or two 5′-terminal ribonucleotide of the second strand within the double-stranded region comprises a 2′-sugar substitution. In related embodiments, at least one or two 5′-terminal ribonucleotide of the first strand within the double-stranded region comprises a 2′-sugar substitution. In other related embodiments, at least one or two 5′-terminal ribonucleotide of the second strand and at least one or two 5′-terminal ribonucleotide of the first strand within the double-stranded regions comprise independent 2′-sugar substitutions. In other embodiments, the mdRNA molecule comprises at least three 5-methyluridines within at least one double-stranded region. In some embodiments, the mdRNA molecule has a blunt end at one or both ends. In other embodiments, the 5′-terminal of the third strand is a hydroxyl or a phosphate.

### BRIEF DESCRIPTION OF THE DRAWINGS

[0012] FIG. 1 shows the average gene silencing activity of intact (first bar), nicked (middle bar), and gapped (last bar) dsRNA Dicer substrate specific for each of 22 different targets (AKT, EGFR, FLT1, FRAP1, HIF1A, IL17A, IL18, IL6, MAP2K1, MAPK1, MAPK14, PDGFA, PDGFRA, PIKC3A, PKN3, RAF1, SRD5A1, TNF, TNFSF13B, VEGFA, BCR-ABL [b2a2], and BCR-ABL [b3a2]). Each bar is a graphical representation of an average activity of ten different sequences for each target, which is calculated from the data found in Table 1.

[0013] FIG. 2 shows knockdown activity for RISC activator lacZ dsRNA (21 nucleotide sense strand/21 nucleotide antisense strand; 21/21), Dicer substrate lacZ dsRNA (25 nucleotide sense strand/27 nucleotide antisense strand; 25/27), and meroduplex lacZ mdRNA (13 nucleotide sense strand and 11 nucleotide sense strand/27 nucleotide antisense strand; 13, 11/27—the sense strand is missing one nucleotide so that a single nucleotide gap is left between the 13 nucleotide and 11 nucleotide sense strands when annealed to the 27 nucleotide antisense strand. Knockdown activities were normalized to a Qneg control dsRNA and presented as a normalized value of Qneg (i.e., Qneg represents 100% or “normal” gene expression levels). A smaller value indicates a greater knockdown effect.

[0014] FIG. 3 shows knockdown activity of a RISC activator influenza dsRNA G1498 (21/21) and nicked dsRNA (10, 11/21) at 100 nM. The “wt” designation indicates an unsubstituted RNA molecule; “rT” indicates RNA having each uridine substituted with a ribothymidine; and “p” indicates that the 5′-nucleotide of that strand was phosphorylated. The 21 nucleotide sense and antisense strands of G1498 were individually nicked between the nucleotides 10 and 11 as measured from the 5′-end, and is referred to as 11, 10/21 and 21/10, 11, respectively. The G1498 single stranded 21 nucleotide antisense strand alone (designated AS-only) was used as a control.

[0015] FIG. 4 shows knockdown activity of a lacZ dicer substrate (25/27) having a nick in one of each of positions 8 to 14 and a one nucleotide gap at position 13 of the sense strand (counted from the 5′-end). A dideoxy guanosine (ddG) was incorporated at the 5′-end of the 3′-most strand of the nicked or gapped sense sequence at position 13. FIG. 4 discloses SEQ ID NO: 3.

[0016] FIG. 5 shows knockdown activity of a dicer substrate influenza dsRNA G1498DS (25/27) and this sequence nicked at one of each of positions 8 to 14 of the sense strand, and shows the activity of these nicked molecules that are also phosphorylated or have a locked nucleic acid substitution.

[0017] FIG. 6 shows a dose dependent knockdown activity a dicer substrate influenza dsRNA G1498DS (25/27) and this sequence nicked at position 13 of the sense strand.

[0018] FIG. 7 shows knockdown activity of a dicer substrate influenza dsRNA G1498DS having a nick or a gap of one to six nucleotides that begins at any one of positions 8 to 12 of the sense strand.

[0019] FIG. 8 shows knockdown activity of a LacZ RISC dsRNA having a nick or a gap of one to six nucleotides that begins at any one of positions 8 to 14 of the sense strand.

[0020] FIG. 9 shows knockdown activity of an influenza RISC dsRNA having a nick at any one of positions 8 to 14 of the sense strand and further having one or two locked nucleic acids (LNA) per sense strand. The inserts on the right side of the graph provides a graphic depiction of the meroduplex structures (for clarity, a single antisense strand is shown at the bottom of the grouping with each of the different nicked sense strands above the antisense) having different nick positions with the relative positioning of the LNAs on the sense strands.

[0021] FIG. 10 shows knockdown activity of a LacZ dicer substrate dsRNA having a nick at any one of positions 8 to 14 of the sense strand as compared to the same nicked dicer substrates but having a locked nucleic acid substitution.

[0022] FIG. 11 shows the percent knockdown in influenza viral titers using influenza specific mdRNA against influenza strain WSN.

[0023] FIG. 12 shows the in vivo reduction in PR8 influenza viral titers using influenza specific mdRNA as measured by TCID₅₀.

### DETAILED DESCRIPTION

[0024] The instant disclosure is predicated upon the unexpected discovery that a nicked or gapped double-stranded RNA (dsRNA) comprising at least three strands is a suitable substrate for Dicer or RISC and, therefore, may be advantageously employed for gene silencing via, for example, the RNA interference pathway. That is, partially duplexed dsRNA molecules described herein (also referred to as meroduplexes having a nick or gap in at least one strand) are capable of initiating an RNA interference cascade that modifies (e.g., reduces) expression of a target messenger RNA (mRNA), such as a human survivin (BIRC5) mRNA. A person of skill in the art would expect the thermodynamically less stable nicked or gapped dsRNA passenger strand (as compared to an intact dsRNA) to fall apart before any gene silencing effect would result (see, e.g., Leuschner et al., EMBO 7:314, 2006).

[0025] Meroduplex ribonucleic acid (mdRNA) molecules described herein include a first (antisense) strand that is complementary to a human BIRC5 mRNA as set forth in SEQ ID NO: 1158, 1159 or 1160, along with second and third strands (together forming a gapped sense strand) that are each complementary to non-overlapping regions of the first strand, wherein the second and third strands can anneal with the first strand to form at least two double-stranded regions separated by a gap, and wherein at least one double-stranded region is from about 5 base pairs to about 15 base pairs, or the combined double-stranded regions total about 15 base pairs to about 40 base pairs and the mdRNA is blunt-ended. The gap can be from 0 nucleotides (i.e., a nick in which only a phosphodiester bond between two nucleotides is broken in a polynucleotide molecule) up to about 10 nucleotides (i.e., the first strand will have at least one unpaired nucleotide). In certain embodiments, the nick or gap is located 10 nucleotides from the 5′-end of the first (antisense) strand or at the Argonaute cleavage site. In another embodiment, the meroduplex nick or gap is positioned such that the thermal stability is maximized for the first and second strand duplex and for the first and third strand duplex as compared to the thermal stability of such meroduplexes having a nick or gap in a different position. Also provided herein are methods of using such dsRNA to reduce expression of a BIRC5 gene in a cell or to treat or prevent diseases or disorders associated with BIRC5 gene expression, including atherosclerosis, diabetes mellitus, and cerebrovascular disease.

[0026] Prior to introducing more detail to this disclosure, it may be helpful to an appreciation thereof to provide definitions of certain terms to be used herein.

[0027] In the present description, any concentration range, percentage range, ratio range, or integer range is to be understood to include the value of any integer within the recited range and, when appropriate, fractions thereof (such as one tenth and one hundredth of an integer), unless otherwise indicated. Also, any number range recited herein relating to any physical feature, such as polymer subunits, size or thickness, are to be understood to include any integer within the recited range, unless otherwise indicated. As used herein, “about” or “consisting essentially of mean±20% of the indicated range, value, or structure, unless otherwise indicated. As used herein, the terms “include” and “comprise” are open ended and are used synonymously. It should be understood that the terms “a” and “an” as used herein refer to “one or more” of the enumerated components. The use of the alternative (e.g., “or”) should be understood to mean either one, both, or any combination thereof of the alternatives.

[0028] As used herein, the term “isolated” means that the referenced material (e.g., nucleic acid molecules of the instant disclosure), is removed from its original environment, such as being separated from some or all of the co-existing materials in a natural environment (e.g., a natural environment may be a cell).

[0029] As used herein, “complementary” refers to a nucleic acid molecule that can form hydrogen bond(s) with another nucleic acid molecule or itself by either traditional Watson-Crick base pairing or other non-traditional types of pairing (e.g., Hoogsteen or reversed Hoogsteen hydrogen bonding) between complementary nucleosides or nucleotides. In reference to the nucleic molecules of the present disclosure, the binding free energy for a nucleic acid molecule with its complementary sequence is sufficient to allow the relevant function of the nucleic acid molecule to proceed, for example, RNAi activity, and there is a sufficient degree of complementarity to avoid non-specific binding of the nucleic acid molecule (e.g., dsRNA) to non-target sequences under conditions in which specific binding is desired, i.e., under physiological conditions in the case of in vivo assays or therapeutic treatment, or under conditions in which the assays are performed in the case of in vitro assays (e.g., hybridization assays). Determination of binding free energies for nucleic acid molecules is well known in the art (see, e.g., Turner et al., CSH Symp. Quant. Biol. LII:123, 1987; Frier et al., Proc. Nat'l. Acad. Sci. USA 83:9373, 1986; Turner et al., J. Am. Chem. Soc. 109:3783, 1987). Thus, “complementary” or “specifically hybridizable” or “specifically binds” are terms that indicate a sufficient degree of complementarity or precise pairing such that stable and specific binding occurs between a nucleic acid molecule (e.g., dsRNA) and a DNA or RNA target. It is understood in the art that a nucleic acid molecule need not be 100% complementary to a target nucleic acid sequence to be specifically hybridizable or to specifically bind. That is, two or more nucleic acid molecules may be less than fully complementary and is indicated by a percentage of contiguous residues in a nucleic acid molecule that can form hydrogen bonds with a second nucleic acid molecule.

[0030] For example, a first nucleic acid molecule may have 10 nucleotides and a second nucleic acid molecule may have 10 nucleotides, then base pairing of 5, 6, 7, 8, 9, or 10 nucleotides between the first and second nucleic acid molecules, which may or may not form a contiguous double-stranded region, represents 50%, 60%, 70%, 80%, 90%, and 100% complementarity, respectively. In certain embodiments, complementary nucleic acid molecules may have wrongly paired bases—that is, bases that cannot form a traditional Watson-Crick base pair or other non-traditional types of pair (i.e., “mismatched” bases). For instance, complementary nucleic acid molecules may be identified as having a certain number of “mismatches,” such as zero or about 1, about 2, about 3, about 4 or about 5.

[0031] “Perfectly” or “fully” complementary nucleic acid molecules means those in which a certain number of nucleotides of a first nucleic acid molecule hydrogen bond (anneal) with the same number of residues in a second nucleic acid molecule to form a contiguous double-stranded region. For example, two or more fully complementary nucleic acid molecule strands can have the same number of nucleotides (i.e., have the same length and form one double-stranded region, with or without an overhang) or have a different number of nucleotides (e.g., one strand may be shorter than but fully contained within another strand or one strand may overhang the other strand).

[0032] By “ribonucleic acid” or “RNA” is meant a nucleic acid molecule comprising at least one ribonucleotide molecule. As used herein, “ribonucleotide” refers to a nucleotide with a hydroxyl group at the 2′-position of a β-D-ribofuranose moiety. The term RNA includes double-stranded (ds) RNA, single-stranded (ss) RNA, isolated RNA (such as partially purified RNA, essentially pure RNA, synthetic RNA, recombinantly produced RNA), altered RNA (which differs from naturally occurring RNA by the addition, deletion, substitution or alteration of one or more nucleotides), or any combination thereof. For example, such altered RNA can include addition of non-nucleotide material, such as at one or both ends of an RNA molecule, internally at one or more nucleotides of the RNA, or any combination thereof. Nucleotides in RNA molecules of the instant disclosure can also comprise non-standard nucleotides, such as naturally occurring nucleotides, non-naturally occurring nucleotides, chemically-modified nucleotides, deoxynucleotides, or any combination thereof. These altered RNAs may be referred to as analogs or analogs of RNA containing standard nucleotides (i.e., standard nucleotides, as used herein, are considered to be adenine, cytidine, guanidine, thymidine, and uridine).

[0033] The term “dsRNA” as used herein, which is interchangeable with “mdRNA,” refers to any nucleic acid molecule comprising at least one ribonucleotide molecule and capable of inhibiting or down regulating gene expression, for example, by promoting RNA interference (“RNAi”) or gene silencing in a sequence-specific manner. The dsRNAs (mdRNAs) of the instant disclosure may be suitable substrates for Dicer or for association with RISC to mediate gene silencing by RNAi. Examples of dsRNA molecules of this disclosure are provided in the Sequence Listing identified herein. One or both strands of the dsRNA can further comprise a terminal phosphate group, such as a 5′-phosphate or 5′, 3′-diphosphate. As used herein, dsRNA molecules, in addition to at least one ribonucleotide, can further include substitutions, chemically-modified nucleotides, and non-nucleotides. In certain embodiments, dsRNA molecules comprise ribonucleotides up to about 100% of the nucleotide positions.

[0034] In addition, as used herein, the term dsRNA is meant to be equivalent to other terms used to describe nucleic acid molecules that are capable of mediating sequence specific RNAi, for example, meroduplex RNA (mdRNA), nicked dsRNA (ndsRNA), gapped dsRNA (gdsRNA), short interfering nucleic acid (siNA), siRNA, micro-RNA (miRNA), short hairpin RNA (shRNA), short interfering oligonucleotide, short interfering substituted oligonucleotide, short interfering modified oligonucleotide, chemically-modified dsRNA, post-transcriptional gene silencing RNA (ptgsRNA), or the like. The term “large double-stranded RNA” (“large dsRNA”) refers to any double-stranded RNA longer than about 40 base pairs (bp) to about 100 by or more, particularly up to about 300 by to about 500 bp. The sequence of a large dsRNA may represent a segment of an mRNA or an entire mRNA. A double-stranded structure may be formed by a self-complementary nucleic acid molecule or by annealing of two or more distinct complementary nucleic acid molecule strands.

[0035] In one aspect, a dsRNA comprises two separate oligonucleotides, comprising a first strand (antisense) and a second strand (sense), wherein the antisense and sense strands are self-complementary (i.e., each strand comprises a nucleotide sequence that is complementary to a nucleotide sequence in the other strand and the two separate strands form a duplex or double-stranded structure, for example, wherein the double-stranded region is about 15 to about 24 base pairs or about 26 to about 40 base pairs); the antisense strand comprises a nucleotide sequence that is complementary to a nucleotide sequence in a target nucleic acid molecule or a portion thereof (e.g., a human BIRC5 mRNA of SEQ ID NO: 1158, 1159 or 1160); and the sense strand comprises a nucleotide sequence corresponding (i.e., homologous) to the target nucleic acid sequence or a portion thereof (e.g., a sense strand of about 15 to about 25 nucleotides or about 26 to about 40 nucleotides corresponds to the target nucleic acid or a portion thereof).

[0036] In another aspect, the dsRNA is assembled from a single oligonucleotide in which the self-complementary sense and antisense strands of the dsRNA are linked together by a nucleic acid based-linker or a non-nucleic acid-based linker. In certain embodiments, the first (antisense) and second (sense) strands of the dsRNA molecule are covalently linked by a nucleotide or non-nucleotide linker as described herein and known in the art. In other embodiments, a first dsRNA molecule is covalently linked to at least one second dsRNA molecule by a nucleotide or non-nucleotide linker known in the art, wherein the first dsRNA molecule can be linked to a plurality of other dsRNA molecules that can be the same or different, or any combination thereof. In another embodiment, the linked dsRNA may include a third strand that forms a meroduplex with the linked dsRNA.

[0037] In still another aspect, dsRNA molecules described herein form a meroduplex RNA (mdRNA) having three or more strands such as, for example, an ‘A’ (first or antisense) strand, ‘S1’ (second) strand, and ‘S2’ (third) strand in which the ‘S1’ and ‘S2’ strands are complementary to and form base pairs (bp) with non-overlapping regions of the ‘A’ strand (e.g., an mdRNA can have the form of A:S1S2). The double-stranded region formed by the annealing of the ‘S1’ and ‘A’ strands is distinct from and non-overlapping with the double-stranded region formed by the annealing of the ‘S2’ and ‘A’ strands. An mdRNA molecule is a “gapped” molecule, i.e., it contains a “gap” ranging from 0 nucleotides up to about 10 nucleotides (or a gap of 11, 12, 13, 14, 15, 16, 17, 18, 19, 20, 21, 22, 23, 24, 25, 26, 27, 28, 29, 30, 31, 32, 33, 34 or 35 nucleotides). In one embodiment, the A:S1 duplex is separated from the A:S2 duplex by a gap resulting from at least one unpaired nucleotide (up to about 10 unpaired nucleotides) in the ‘A’ strand that is positioned between the A:S1 duplex and the A:S2 duplex and that is distinct from any one or more unpaired nucleotide at the 3′-end of one or more of the ‘A’, ‘S1’, or ‘S2’ strands. In another embodiment, the A:S1 duplex is separated from the A:S2 duplex by a gap of zero nucleotides (i.e., a nick in which only a phosphodiester bond between two nucleotides is broken or missing in the polynucleotide molecule) between the A:S1 duplex and the A:S2 duplex—which can also be referred to as nicked dsRNA (ndsRNA). For example, A:S1S2 may be comprised of a dsRNA having at least two double-stranded regions that combined total about 14 base pairs to about 40 base pairs and the double-stranded regions are separated by a gap of 0, 1, 2, 3, 4, 5, 6, 7, 8, 9, 10, 11, 12, 13, 14, 15, 16, 17, 18, 19, 20, 21, 22, 23, 24, 25, 26, 27, 28, 29, 30, 31, 32, 33, 34 or 35 nucleotides, optionally having blunt ends, or A:S1S2 may comprise a dsRNA having at least two double-stranded regions spaced apart by up to 10 nucleotides and thereby forming a gap between the second and third strands wherein at least one of the double-stranded regions optionally has from 5 base pairs to 13 base pairs.

[0038] A dsRNA or large dsRNA may include a substitution or modification in which the substitution or modification may be in a phosphate backbone bond, a sugar, a base, or a nucleoside. Such nucleoside substitutions can include natural non-standard nucleosides (e.g., 5-methyluridine or 5-methylcytidine or a 2-thioribothymidine), and such backbone, sugar, or nucleoside modifications can include an alkyl or heteroatom substitution or addition, such as a methyl, alkoxyalkyl, halogen, nitrogen or sulfur, or other modifications known in the art.

[0039] In addition, as used herein, the term “RNAi” is meant to be equivalent to other terms used to describe sequence specific RNA interference, such as post transcriptional gene silencing, translational inhibition, or epigenetics. For example, dsRNA molecules of this disclosure can be used to epigenetically silence genes at the post-transcriptional level or the pre-transcriptional level or any combination thereof.

[0040] As used herein, “target nucleic acid” refers to any nucleic acid sequence whose expression or activity is to be altered (e.g., BIRC5). The target nucleic acid can be DNA, RNA, or analogs thereof, and includes single, double, and multi-stranded forms. By “target site” or “target sequence” is meant a sequence within a target nucleic acid (e.g., mRNA) that, when present in an RNA molecule, is “targeted” for cleavage by RNAi and mediated by a dsRNA construct of this disclosure containing a sequence within the antisense strand that is complementary to the target site or sequence.

[0041] As used herein, “off-target effect” or “off-target profile” refers to the observed altered expression pattern of one or more genes in a cell or other biological sample not targeted, directly or indirectly, for gene silencing by an mdRNA or dsRNA. For example, an off-target effect can be quantified by using a DNA microarray to determine how many non-target genes have an expression level altered by about two-fold or more in the presence of a candidate mdRNA or dsRNA, or analog thereof specific for a target sequence, such as a BIRC5 mRNA. A “minimal off-target effect” means that an mdRNA or dsRNA affects expression by about two-fold or more of about 25% to about 1% of the non-target genes examined or it means that the off-target effect of substituted or modified mdRNA or dsRNA (e.g., having at least one uridine substituted with a 5-methyluridine or 2-thioribothymidine and optionally having at least one nucleotide modified at the 2′-position), is reduced by at least about 1% to about 80% or more as compared to the effect on non-target genes of an unsubstituted or unmodified mdRNA or dsRNA.

[0042] By “sense region” or “sense strand” is meant one ore more nucleotide sequences of a dsRNA molecule having complementarity to one or more antisense regions of the dsRNA molecule. In addition, the sense region of a dsRNA molecule comprises a nucleic acid sequence having homology or identity to a target sequence, such as BIRC5. By “antisense region” or “antisense strand” is meant a nucleotide sequence of a dsRNA molecule having complementarity to a target nucleic acid sequence, such as BIRC5. In addition, the antisense region of a dsRNA molecule can comprise nucleic acid sequence region having complementarity to one or more sense strands of the dsRNA molecule.

[0043] “Analog” as used herein refers to a compound that is structurally similar to a parent compound (e.g., a nucleic acid molecule), but differs slightly in composition (e.g., one atom or functional group is different, added, or removed). The analog may or may not have different chemical or physical properties than the original compound and may or may not have improved biological or chemical activity. For example, the analog may be more hydrophilic or it may have altered activity as compared to a parent compound. The analog may mimic the chemical or biological activity of the parent compound (i.e., it may have similar or identical activity), or, in some cases, may have increased or decreased activity. The analog may be a naturally or non-naturally occurring (e.g., chemically-modified or recombinant) variant of the original compound. An example of an RNA analog is an RNA molecule having a non-standard nucleotide, such as 5-methyuridine or 5-methylcytidine or 2-thioribothymidine, which may impart certain desirable properties (e.g., improve stability, bioavailability, minimize off-target effects or interferon response).

[0044] As used herein, the term “universal base” refers to nucleotide base analogs that form base pairs with each of the standard DNA/RNA bases with little discrimination between them. A universal base is thus interchangeable with all of the standard bases when substituted into a nucleotide duplex (see, e.g., Loakes et al., J. Mol. Bio. 270:426, 1997). Examplary universal bases include C-phenyl, C-naphthyl and other aromatic derivatives, inosine, azole carboxamides, or nitroazole derivatives such as 3-nitropyrrole, 4-nitroindole, 5-nitroindole, and 6-nitroindole (see, e.g., Loakes, Nucleic Acids Res. 29:2437, 2001).

[0045] The term “gene” as used herein, especially in the context of “target gene” or “gene target” for RNAi, means a nucleic acid molecule that encodes an RNA or a transcription product of such gene, including a messenger RNA (mRNA, also referred to as structural genes that encode for a polypeptide), an mRNA splice variant of such gene, a functional RNA (fRNA), or non-coding RNA (ncRNA), such as small temporal RNA (stRNA), microRNA (miRNA), small nuclear RNA (snRNA), short interfering RNA (siRNA), small nucleolar RNA (snRNA), ribosomal RNA (rRNA), transfer RNA (tRNA) and precursor RNAs thereof. Such non-coding RNAs can serve as target nucleic acid molecules for dsRNA mediated RNAi to alter the activity of the target RNA involved in functional or regulatory cellular processes.

[0046] As used herein, “gene silencing” refers to a partial or complete loss-of-function through targeted inhibition of gene expression in a cell, which may also be referred to as RNAi “knockdown,” “inhibition,” “down-regulation,” or “reduction” of expression of a target gene, such as a human BIRC5 gene. Depending on the circumstances and the biological problem to be addressed, it may be preferable to partially reduce gene expression. Alternatively, it might be desirable to reduce gene expression as much as possible. The extent of silencing may be determined by methods described herein and known in the art (see, e.g., PCT Publication No. WO 99/32619; Elbashir et al., EMBO J. 20:6877, 2001). Depending on the assay, quantification of gene expression permits detection of various amounts of inhibition that may be desired in certain embodiments of this disclosure, including prophylactic and therapeutic methods, which will be capable of knocking down target gene expression, in terms of mRNA level or protein level or activity, for example, by equal to or greater than 10%, 30%, 50%, 75% 90%, 95% or 99% of baseline (i.e., normal) or other control levels, including elevated expression levels as may be associated with particular disease states or other conditions targeted for therapy.

[0047] As used herein, the term “therapeutically effective amount” means an amount of dsRNA that is sufficient to result in a decrease in severity of disease symptoms, an increase in frequency or duration of disease symptom-free periods, or a prevention of impairment or disability due to the disease, in the subject (e.g., human) to which it is administered. For example, a therapeutically effective amount of dsRNA directed against an mRNA of BIRC5 (e.g., SEQ ID NO: 1158, 1159 or 1160) can inhibit the deposition of lipoproteins in the walls of arteries by at least about 20%, at least about 40%, at least about 60%, or at least about 80% relative to untreated subjects. A therapeutically effective amount of a therapeutic compound can decrease, for example, atheromatous plaque size or otherwise ameliorate symptoms in a subject. One of ordinary skill in the art would be able to determine such therapeutically effective amounts based on such factors as the subject's size, the severity of symptoms, and the particular composition or route of administration selected. The nucleic acid molecules of the instant disclosure, individually, or in combination or in conjunction with other drugs, can be used to treat diseases or conditions discussed herein. For example, to treat a particular disease, disorder, or condition, the dsRNA molecules can be administered to a patient or can be administered to other appropriate cells evident to those skilled in the art, individually or in combination with one or more drugs, under conditions suitable for treatment.

[0048] In addition, one or more dsRNA may be used to knockdown expression of a BIRC5 mRNA as set forth in SEQ ID NO: 1158, 1159 or 1160, or a related mRNA splice variant. In this regard it is noted that a BIRC5 gene may be transcribed into two or more mRNA splice variants; and thus, for example, in certain embodiments, knockdown of one mRNA splice variant without affecting the other mRNA splice variant may be desired, or vice versa; or knockdown of all transcription products may be targeted.

[0049] In addition, it should be understood that the individual compounds, or groups of compounds, derived from the various combinations of the structures and substituents described herein, are disclosed by the present application to the same extent as if each compound or group of compounds was set forth individually. Thus, selection of particular structures or particular substituents is within the scope of the present disclosure. As described herein, all value ranges are inclusive over the indicated range. Thus, a range of C₁-C₄ will be understood to include the values of 1, 2, 3, and 4, such that C₁, C₂, C₃ and C₄ are included.

[0050] The term “alkyl” as used herein refers to saturated straight- or branched-chain aliphatic groups containing from 1-20 carbon atoms, preferably 1-8 carbon atoms and most preferably 1-4 carbon atoms. This definition applies as well to the alkyl portion of alkoxy, alkanoyl and aralkyl groups. The alkyl group may be substituted or unsubstituted. In certain embodiments, the alkyl is a (C₁-C₄) alkyl or methyl.

[0051] The term “cycloalkyl” as used herein refers to a saturated cyclic hydrocarbon ring system containing from 3 to 12 carbon atoms that may be optionally substituted. Exemplary embodiments include, but are not limited to, cyclopropyl, cyclobutyl, cyclopentyl and cyclohexyl. In certain embodiments, the cycloalkyl group is cyclopropyl. In another embodiment, the (cycloalkyl)alkyl groups contain from 3 to 12 carbon atoms in the cyclic portion and 1 to 6 carbon atoms in the alkyl portion. In certain embodiments, the (cycloalkyl)alkyl group is cyclopropylmethyl. The alkyl groups are optionally substituted with from one to three substituents selected from the group consisting of halogen, hydroxy and amino.

[0052] The terms “alkanoyl” and “alkanoyloxy” as used herein refer, respectively, to —C(O)-alkyl groups and —O—C(═O)-alkyl groups, each optionally containing 2 to 10 carbon atoms. Specific embodiments of alkanoyl and alkanoyloxy groups are acetyl and acetoxy, respectively.

[0053] The term “alkenyl” refers to an unsaturated branched, straight-chain or cyclic alkyl group having 2 to 15 carbon atoms and having at least one carbon-carbon double bond derived by the removal of one hydrogen atom from a single carbon atom of a parent alkene. The group may be in either the cis or trans conformation about the double bond(s). Certain embodiments include ethenyl, 1-propenyl, 2-propenyl, 1-methylethenyl, 1-butenyl, 2-butenyl, 3-butenyl, 2-methyl-2-propenyl, 1-pentenyl, 2-pentenyl, 4-pentenyl, 3-methyl-2-butenyl, 1-hexenyl, 2-hexenyl, 1-heptenyl, 2-heptenyl, 1-octenyl, 2-octenyl, 1,3-octadienyl, 2-nonenyl, 1,3-nonadienyl, 2-decenyl, etc., or the like. The alkenyl group may be substituted or unsubstituted.

[0054] The term “alkynyl” as used herein refers to an unsaturated branched, straight-chain, or cyclic alkyl group having 2 to 10 carbon atoms and having at least one carbon-carbon triple bond derived by the removal of one hydrogen atom from a single carbon atom of a parent alkyne. Exemplary alkynyls include ethynyl, 1-propynyl, 2-propynyl, 1-butynyl, 2-butynyl, 3-butynyl, 1-pentynyl, 2-pentynyl, 4-pentynyl, 1-octynyl, 6-methyl-1-heptynyl, 2-decynyl, or the like. The alkynyl group may be substituted or unsubstituted.

[0055] The term “hydroxyalkyl” alone or in combination, refers to an alkyl group as previously defined, wherein one or several hydrogen atoms, preferably one hydrogen atom has been replaced by a hydroxyl group. Examples include hydroxymethyl, hydroxyethyl and 2-hydroxyethyl.

[0056] The term “aminoalkyl” as used herein refers to the group —NRR′, where R and R′ may independently be hydrogen or (C₁-C₄) alkyl.

[0057] The term “alkylaminoalkyl” refers to an alkylamino group linked via an alkyl group (i.e., a group having the general structure -alkyl-NH-alkyl or -alkyl-N(alkyl)(alkyl)). Such groups include, but are not limited to, mono- and di-(C₁-C₈ alkyl)aminoC₁-C₈ alkyl, in which each alkyl may be the same or different.

[0058] The term “dialkylaminoalkyl” refers to alkylamino groups attached to an alkyl group. Examples include, but are not limited to, N,N-dimethylaminomethyl, N,N-dimethylaminoethyl N,N-dimethylaminopropyl, and the like. The term dialkylaminoalkyl also includes groups where the bridging alkyl moiety is optionally substituted.

[0059] The term “haloalkyl” refers to an alkyl group substituted with one or more halo groups, for example chloromethyl, 2-bromoethyl, 3-iodopropyl, trifluoromethyl, perfluoropropyl, 8-chlorononyl, or the like.

[0060] The term “carboxyalkyl” as used herein refers to the substituent —R¹⁰—COOH, wherein R¹⁰ is alkylene; and “carbalkoxyalkyl” refers to —C(═O)OR¹¹, wherein R¹⁰ and R¹¹ are alkylene and alkyl respectively. In certain embodiments, alkyl refers to a saturated straight- or branched-chain hydrocarbyl radical of 1 to 6 carbon atoms such as methyl, ethyl, n-propyl, isopropyl, n-butyl, t-butyl, n-pentyl, 2-methylpentyl, n-hexyl, and so forth. Alkylene is the same as alkyl except that the group is divalent.

[0061] The term “alkoxy” includes substituted and unsubstituted alkyl, alkenyl, and alkynyl groups covalently linked to an oxygen atom. In one embodiment, the alkoxy group contains 1 to about 10 carbon atoms. Embodiments of alkoxy groups include, but are not limited to, methoxy, ethoxy, isopropyloxy, propoxy, butoxy, and pentoxy groups.

[0062] Embodiments of substituted alkoxy groups include halogenated alkoxy groups. In a further embodiment, the alkoxy groups can be substituted with groups such as alkenyl, alkynyl, halogen, hydroxyl, alkylcarbonyloxy, arylcarbonyloxy, alkoxycarbonyloxy, aryloxycarbonyloxy, carboxylate, alkylcarbonyl, arylcarbonyl, alkoxycarbonyl, aminocarbonyl, alkylaminocarbonyl, dialkylaminocarbonyl, alkylthiocarbonyl, alkoxyl, phosphate, phosphonato, phosphinato, cyano, amino (including alkylamino, dialkylamino, arylamino, diarylamino, and alkylarylamino), acylamino (including alkylcarbonylamino, arylcarbonylamino, carbamoyl and ureido), amidino, imino, sulfhydryl, alkylthio, arylthio, thiocarboxylate, sulfates, alkylsulfinyl, sulfonato, sulfamoyl, sulfonamido, nitro, trifluoromethyl, cyano, azido, heterocyclyl, alkylaryl, or an aromatic or heteroaromatic moieties. Exemplary halogen substituted alkoxy groups include, but are not limited to, fluoromethoxy, difluoromethoxy, trifluoromethoxy, chloromethoxy, dichloromethoxy, and trichloromethoxy.

[0063] The term “alkoxyalkyl” refers to an alkylene group substituted with an alkoxy group. For example, methoxyethyl (CH₃OCH₂CH₂—) and ethoxymethyl (CH₃CH₂OCH₂—) are both C₃ alkoxyalkyl groups.

[0064] The term “aryl” as used herein refers to monocyclic or bicyclic aromatic hydrocarbon groups having from 6 to 12 carbon atoms in the ring portion, for example, phenyl, naphthyl, biphenyl and diphenyl groups, each of which may be substituted with, for example, one to four substituents such as alkyl; substituted alkyl as defined above, halogen, trifluoromethyl, trifluoromethoxy, hydroxy, alkoxy, cycloalkyloxy, alkanoyl, alkanoyloxy, amino, alkylamino, dialkylamino, nitro, cyano, carboxy, carboxyalkyl, carbamyl, carbamoyl and aryloxy. Specific embodiments of aryl groups in accordance with the present disclosure include phenyl, substituted phenyl, naphthyl, biphenyl, and diphenyl.

[0065] The term “aroyl,” as used alone or in combination herein, refers to an aryl radical derived from an aromatic carboxylic acid, such as optionally substituted benzoic or naphthoic acids.

[0066] The term “aralkyl” as used herein refers to an aryl group bonded to the 2-pyridinyl ring or the 4-pyridinyl ring through an alkyl group, preferably one containing 1 to 10 carbon atoms. A preferred aralkyl group is benzyl.

[0067] The term “carboxy,” as used herein, represents a group of the formula —C(═O)OH or —C(═O)O⁻.

[0068] The term “carbonyl” as used herein refers to a group in which an oxygen atom is double-bonded to a carbon atom —C═O.

[0069] The term “trifluoromethyl” as used herein refers to —CF₃.

[0070] The term “trifluoromethoxy” as used herein refers to —OCF₃.

[0071] The term “hydroxyl” as used herein refers to —OH or —O⁻.

[0072] The term “nitrile” or “cyano” as used herein refers to the group —CN.

[0073] The term “nitro,” as used herein alone or in combination refers to a —NO₂ group.

[0074] The term “amino” as used herein refers to the group —NR⁹R⁹, wherein R⁹ may independently be hydrogen, alkyl, aryl, alkoxy, or heteroaryl. The term “aminoalkyl” as used herein represents a more detailed selection as compared to “amino” and refers to the group —NR′R′, wherein R′ may independently be hydrogen or (C₁-C₄) alkyl. The term “dialkylamino” refers to an amino group having two attached alkyl groups that can be the same or different.

[0075] The term “alkanoylamino” refers to alkyl, alkenyl or alkynyl groups containing the group —C(═O)— followed by —N(H)—, for example acetylamino, propanoylamino and butanoylamino and the like.

[0076] The term “carbonylamino” refers to the group —NR′—CO—CH₂—R′, wherein R′ may be independently selected from hydrogen or (C₁-C₄)alkyl.

[0077] The term “carbamoyl” as used herein refers to —O—C(O)NH₂.

[0078] The term “carbamyl” as used herein refers to a functional group in which a nitrogen atom is directly bonded to a carbonyl, i.e., as in —NR″C(═O)R″ or —C(═O)NR″R″, wherein R″ can be independently hydrogen, alkyl, substituted alkyl, alkenyl, substituted alkenyl, alkoxy, cycloalkyl, aryl, heterocyclo, or heteroaryl.

[0079] The term “alkylsulfonylamino” refers to the group —NHS(O)₂R¹², wherein R¹² is alkyl.

[0080] The term “halogen” as used herein refers to bromine, chlorine, fluorine or iodine. In one embodiment, the halogen is fluorine. In another embodiment, the halogen is chlorine.

[0081] The term “heterocyclo” refers to an optionally substituted, unsaturated, partially saturated, or fully saturated, aromatic or nonaromatic cyclic group that is a 4 to 7 membered monocyclic, or 7 to 11 membered bicyclic ring system that has at least one heteroatom in at least one carbon atom-containing ring. The substituents on the heterocyclo rings may be selected from those given above for the aryl groups. Each ring of the heterocyclo group containing a heteroatom may have 1, 2, or 3 heteroatoms selected from nitrogen, oxygen or sulfur. Plural heteroatoms in a given heterocyclo ring may be the same or different.

[0082] Exemplary monocyclic heterocyclo groups include pyrrolidinyl, pyrrolyl, indolyl, pyrazolyl, imidazolyl, oxazolyl, isoxazolyl, thiazolyl, furyl, tetrahydrofuryl, thienyl, piperidinyl, piperazinyl, azepinyl, pyrimidinyl, pyridazinyl, tetrahydropyranyl, morpholinyl, dioxanyl, triazinyl and triazolyl. Preferred bicyclic heterocyclo groups include benzothiazolyl, benzoxazolyl, benzothienyl, quinolinyl, tetrahydroisoquinolinyl, benzimidazolyl, benzofuryl, indazolyl, benzisothiazolyl, isoindolinyl and tetrahydroquinolinyl. In more detailed embodiments heterocyclo groups may include indolyl, imidazolyl, furyl, thienyl, thiazolyl, pyrrolidyl, pyridyl and pyrimidyl.

[0083] “Substituted” refers to a group in which one or more hydrogen atoms are each independently replaced with the same or different substituent(s). Representative substituents include —X, —R⁶, —O—, ═O, —OR, —SR⁶, —S—, ═S, —NR⁶R⁶, ═NR⁶, —CX₃, —CF₃, —CN, —OCN, —SCN, —NO, —NO₂, ═N₂, —N₃, —S(═O)₂O—, —S(═O)₂OH, —S(═O)₂R⁶, —OS(═O)₂O—, —OS(═O)₂OH, —OS(═O)₂R⁶, —P(═O)(O⁻)₂, —P(═O)(OH)(O⁻), —OP(═O)₂(O⁻), —C(—O)R⁶, —C(═S)R⁶, —C(═O)OR⁶, —C(50 O)O⁻, —C(═S)OR⁶, —NR⁶—C(═O)—N(R⁶)₂, —NR⁶—C(═S)—N(R⁶)₂, and —C(═NR⁶)NR⁶R⁶, wherein each X is independently a halogen; and each R⁶ is independently hydrogen, halogen, alkyl, aryl, arylalkyl, arylaryl, arylheteroalkyl, heteroaryl, heteroarylalkyl, NR⁷R⁷, —C(═O)R⁷, and —S(═O)₂R⁷; and each R⁷ is independently hydrogen, alkyl, alkanyl, alkynyl, aryl, arylalkyl, arylheteralkyl, arylaryl, heteroaryl or heteroarylalkyl. Aryl containing substituents, whether or not having one or more substitutions, may be attached in a para (p-), meta (m-) or ortho (o-) conformation, or any combination thereof.

Baculoviral IAP repeat-containing protein 5 (BIRC5 or Survivin) and Exemplary dsRNA Molecules

[0084] The product of the baculoviral IAP repeat-containing protein 5 gene (BIRC5; also known as Survivin, API4, IAP4, EPR-1) is an antiapoptotic protein which inhibits capsapse activation (e.g., Caspase 3 and 7) and plays a role in negatively regulating apoptosis. BIRC5 is thought to play a role in regulating mitosis, and expressed in most human tumors and fetal tissue, but absent in terminally differentiated cells. Mutation or overexpression of BIRC5 that increases activity is associated with a variety of disorders including, for example, bladder cancer, hepatocellular carcinoma (HCC), NSCLC (lung nonsmall cell lung cancer), melanoma, leukemia, colon cancer, postate cancer, breast cancer, ovarian cancer, glioblastoma, and ovarian cancer.

[0085] More detail regarding BIRC5 and related disorders are described at www.ncbi.nlm.nih.gov/entrez/query.fcgi?db=OMIM, which is in the Online Mendelian Inheritance in Man database (OMIM Accession No. 603352). The complete mRNA sequence of human BIRC5 has Genbank accession number NM_{—}001012270 (SEQ ID NO:1158). As used herein, reference to an BIRC5 mRNA or RNA sequence or sense strand means an BIRC5 RNA as set forth in SEQ ID NO:1158, SEQ ID NO:1159 and SEQ ID NO:1160 as well as isoforms, variants, and homologs having at least 80% or more identity with the human BIRC5 mRNA sequence as set forth in SEQ ID NO:1158, SEQ ID NO:1159 and SEQ ID NO:1160.

[0086] As used herein, reference to BIRC5 mRNA or RNA sequences or sense strands means an BIRC5 RNA isoform as set forth in SEQ ID NO: 1158, 1159 or 1160, as well as variants and homologs having at least 80% or more identity with human BIRC5 mRNA sequence as set forth in SEQ ID NO: 1158, 1159 or 1160.

[0087] The “percent identity” between two or more nucleic acid sequences is a function of the number of identical positions shared by the sequences (i.e., % identity=number of identical positions/total number of positions×100), taking into account the number of gaps, and the length of each gap that needs to be introduced to optimize alignment of two or more sequences. The comparison of sequences and determination of percent identity between two or more sequences can be accomplished using a mathematical algorithm, such as BLAST and Gapped BLAST programs at their default parameters (e.g., BLASTN, see www.ncbi.nlm.nih.gov/BLAST; see also Altschul et al., J. Mol. Biol. 215:403-410, 1990).

[0088] In one aspect, the instant disclosure provides an mdRNA molecule, comprising a first strand that is complementary to BIRC5 mRNA as set forth in SEQ ID NO: 1158, 1159 or 1160, and a second strand and a third strand that are each complementary to non-overlapping regions of the first strand, wherein the second strand and third strands can anneal with the first strand to form at least two double-stranded regions spaced apart by up to 10 nucleotides and thereby forming a gap between the second and third strands, and wherein (a) the mdRNA molecule optionally has at least one double-stranded region of 5 base pairs to 13 base pairs, or (b) the combined double-stranded regions total about 15 base pairs to about 40 base pairs and the mdRNA molecule optinally has blunt ends; wherein at least one pyrimidine of the mdRNA is substituted with a pyrimidine nucleoside according to Formula I or II:

[chemical structure]

wherein R¹ and R² are each independently a —H, —OH, —OCH₃, —OCH₂OCH₂CH₃, —OCH₂CH₂OCH₃, halogen, substituted or unsubstituted C₁-C₁₀ alkyl, alkoxy, alkoxyalkyl, hydroxyalkyl, carboxyalkyl, alkylsulfonylamino, aminoalkyl, dialkylamino, alkylaminoalkyl, dialkylaminoalkyl, haloalkyl, trifluoromethyl, cycloalkyl, (cycloalkyl)alkyl, substituted or unsubstituted C₂-C₁₀ alkenyl, substituted or unsubstituted —O-allyl, —O—CH₂CH═CH₂, —O—CH═CHCH₃, substituted or unsubstituted C₂-C₁₀ alkynyl, carbamoyl, carbamyl, carboxy, carbonylamino, substituted or unsubstituted aryl, substituted or unsubstituted aralkyl, —NH₂, —NO₂, —CN, or heterocyclo group; R³ and R⁴ are each independently a hydroxyl, a protected hydroxyl, a phosphate, or an internucleoside linking group; and R⁵ and R⁸ are each independently O or S. In certain embodiments, at least one nucleoside is according to Formula I in which R¹ is methyl and R² is —OH, or R¹ is methyl, R² is —OH, and R⁸ is S. In other embodiments, the internucleoside linking group covalently links from about 5 to about 40 nucleosides. In some embodiments, the gap comprises at least one unpaired nucleotide in the first strand positioned between the double-stranded regions formed by the second and third strands when annealed to the first strand, or the gap is a nick. In certain embodiments, the nick or gap is located 10 nucleotides from the 5′-end of the first (antisense) strand or at the Argonaute cleavage site. In another embodiment, the meroduplex nick or gap is positioned such that the thermal stability is maximized for the first and second strand duplex and for the first and third strand duplex as compared to the thermal stability of such meroduplexes having a nick or gap in a different position.

[0089] In still another aspect, the instant disclosure provides an mdRNA molecule, comprising a first strand that is complementary to survivin (BIRC5) mRNA as set forth in SEQ ID NO: 1158, 1159 or 1160, and a second strand and a third strand that are each complementary to non-overlapping regions of the first strand, wherein the second strand and third strands can anneal with the first strand to form at least two double-stranded regions spaced apart by up to 10 nucleotides and thereby forming a gap between the second and third strands, and wherein the mdRNA molecule optionally includes at least one double-stranded region of 5 base pairs to 13 base pairs. In a further aspect, the instant disclosure provides an mdRNA molecule having a first strand that is complementary to a BIRC5 mRNA as set forth in SEQ ID NO: 1158, 1159 or 1160, and a second strand and a third strand that are each complementary to non-overlapping regions of the first strand, wherein the second strand and third strands can anneal with the first strand to form at least two double-stranded regions spaced apart by up to 10 nucleotides and thereby forming a gap between the second and third strands, and wherein the combined double-stranded regions total about 15 base pairs to about 40 base pairs and the mdRNA molecule optinally has blunt ends. In some embodiments, the gap comprises at least one unpaired nucleotide in the first strand positioned between the double-stranded regions formed by the second and third strands when annealed to the first strand, or the gap is a nick. In certain embodiments, the nick or gap is located 10 nucleotides from the 5′-end of the first (antisense) strand or at the Argonaute cleavage site. In another embodiment, the meroduplex nick or gap is positioned such that the thermal stability is maximized for the first and second strand duplex and for the first and third strand duplex as compared to the thermal stability of such meroduplexes having a nick or gap in a different position.

[0090] As provided herein, any of the aspects or embodiments disclosed herein would be useful in treating BIRC5-associated diseases or disorders, such as atherosclerosis, diabetes mellitus, and cerebrovascular disease.

[0091] In some embodiments, the dsRNA comprises at least three strands in which the first strand comprises about 5 nucleotides to about 40 nucleotides, and the second and third strands include each, individually, about 5 nucleotides to about 20 nucleotides, wherein the combined length of the second and third strands is about 15 nucleotides to about 40 nucleotides. In other embodiments, the dsRNA comprises at least two strands in which the first strand comprises about 15 nucleotides to about 24 nucleotides or about 25 nucleotides to about 40 nucleotides. In yet other embodiments, the first strand comprises about 15 to about 24 nucleotides or about 25 nucleotides to about 40 nucleotides and is complementary to at least about 15, 16, 17, 18, 19, 20, 21, 22, 23, 24, 25, 26, 27, 28, 29, 30, 31, 32, 33, 34, 35, 36, 37, 38, 39, or 40 contiguous nucleotides of a human BIRC5 mRNA as set forth in SEQ ID NO: 1158, 1159 or 1160. In alternative embodiments, the first strand comprises about 15 to about 24 nucleotides or about 25 nucleotides to about 40 nucleotides and is at least about 70%, 75%, 80%, 85%, 90%, 95%, 96%, 97%, 98%, or 99% identical to a sequence that is complementary to at least about 15, 16, 17, 18, 19, 20, 21, 22, 23, 24, 25, 26, 27, 28, 29, 30, 31, 32, 33, 34, 35, 36, 37, 38, 39, or 40 contiguous nucleotides of a human BIRC5 mRNA as set forth in SEQ ID NO: 1158, 1159 or 1160.

[0092] In further embodiments, the first strand will be complementary to a second strand or a second and third strand or to a plurality of strands. The first strand and its complements will be able to form dsRNA and mdRNA molecules of this disclosure, but only about 19 to about 25 nucleotides of the first strand comprise a sequence complementary to a BIRC5 mRNA. For example, a Dicer substrate dsRNA can have about 25 nucleotides to about 40 nucleotides, but with only 19 nucleotides of the antisense (first) strand being complementary to a BIRC5 mRNA. In further embodiments, the first strand having complementarity to a BIRC5 mRNA in about 19 nucleotides to about 25 nucleotides will have one, two, or three mismatches with a BIRC5 mRNA, such as a sequence set forth in SEQ ID NO: 1158, 1159 or 1160, or the first strand of 19 nucleotides to about 25 nucleotides, that for example activates or is capable of loading into RISC, will have at least 80% identity with the corresponding nucleotides found in a BIRC5 mRNA, such as the sequence set forth in SEQ ID NO: 1158, 1159 or 1160.

[0093] Certain illustrative dsRNA molecules, which can be used to design mdRNA or dsRNA molecules and can optionally include substitutions or modifications as described herein are provided in the Sequence Listings as attached herewith, which is herein incorporated by reference (text file named “08-09PCT_Sequence Listing,” created Aug. 5, 2009). Further, sequences disclosed in the text file named “08-09P1 Sequence Listing”, created Aug. 5, 2008 filed with the priority application U.S. 61/086,435 is hereby incorporated by reference In addition, the content of Table B as disclosed in U.S. Provisional Patent Application No. 60/934,930 (filed Mar. 16, 2007), which was submitted with that application as a separate text file named “Table_B_Human_RefSeq_Accession Numbers.txt” (created Mar. 16, 2007 and having a size of 3,604 kilobytes), is incorporated herein by reference in its entirety.

Substituting and Modifying BIRC5 dsRNA Molecules

[0094] The introduction of substituted and modified nucleotides into mdRNA and dsRNA molecules of this disclosure provides a powerful tool in overcoming potential limitations of in vivo stability and bioavailability inherent to native RNA molecules (i.e., having standard nucleotides) that are exogenously delivered. For example, the use of dsRNA molecules of this disclosure can enable a lower dose of a particular nucleic acid molecule for a given therapeutic effect (e.g., reducing or silencing BIRC5 expression) since dsRNA molecules of this disclosure tend to have a longer half-life in serum. Furthermore, certain substitutions and modifications can improve the bioavailability of dsRNA by targeting particular cells or tissues or improving cellular uptake of the dsRNA molecules. Therefore, even if the activity of a dsRNA molecule of this disclosure is reduced as compared to a native RNA molecule, the overall activity of the substituted or modified dsRNA molecule can be greater than that of the native RNA molecule due to improved stability or delivery of the molecule. Unlike native unmodified dsRNA, substituted and modified dsRNA can also minimize the possibility of activating the interferon response in, for example, humans.

[0095] In certain embodiments, a dsRNA molecule of this disclosure has at least one uridine, at least three uridines, or each and every uridine (i.e., all uridines) of the first (antisense) strand of the dsRNA substituted or replaced with 5-methyluridine or 2-thioribothymidine. In a related embodiment, the dsRNA molecule or analog thereof of this disclosure has at least one uridine, at least three uridines, or each and every uridine of the second (sense) strand of the dsRNA substituted or replaced with 5-methyluridine or 2-thioribothymidine. In a related embodiment, the dsRNA molecule or analog thereof of this disclosure has at least one uridine, at least three uridines, or each and every uridine of the third (sense) strand of the dsRNA substituted or replaced with 5-methyluridine or 2-thioribothymidine. In still another embodiment, the dsRNA molecule or analog thereof of this disclosure has at least one uridine, at least three uridines, or each and every uridine of both the first (antisense) and second (sense) strands; of both the first (antisense) and third (sense) strands; of both the second (sense) and third (sense) strands; or of all of the first (antisense), second (sense) and third (sense) strands of the dsRNA substituted or replaced with 5-methyluridine or 2-thioribothymidine. In some embodiments, the double-stranded region of a dsRNA molecule has at least three 5-methyluridines or 2-thioribothymidines. In certain embodiments, dsRNA molecules comprise ribonucleotides at about 5% to about 95% of the nucleotide positions in one strand, both strands, or any combination thereof.

[0096] In further embodiments, a dsRNA molecule that decreases expression of a BIRC5 gene by RNAi according to the instant disclosure further comprises one or more natural or synthetic non-standard nucleoside. In related embodiments, the non-standard nucleoside is one or more deoxyuridine, locked nucleic acid (LNA) molecule, a modified base (e.g., 5-methyluridine), a universal-binding nucleotide, a 2′-O-methyl nucleotide, a modified internucleoside linkage (e.g., phosphorothioate), a G clamp, or any combination thereof. In certain embodiments, the universal-binding nucleotide can be C-phenyl, C-naphthyl, inosine, azole carboxamide, 1-β-D-ribofuranosyl-4-nitroindole, 1-β-D-ribofuranosyl-5-nitroindole, 1-β-D-ribofuranosyl-6-nitroindole, or 1-β-D-ribofuranosyl-3-nitropyrrole.

[0097] Substituted or modified nucleotides present in dsRNA molecules, preferably in the sense or antisense strand, but also optionally in both the antisense and sense strands, comprise modified or substituted nucleotides according to this disclosure having properties or characteristics similar to natural or standard ribonucleotides. For example, this disclosure features dsRNA molecules including nucleotides having a Northern conformation (e.g., Northern pseudorotation cycle; see, e.g., Saenger, Principles of Nucleic Acid Structure, Springer-Verlag ed., 1984). As such, chemically modified nucleotides present in dsRNA molecules of this disclosure, preferably in the antisense strand, but also optionally in the sense or both the antisense and sense strands, are resistant to nuclease degradation while at the same time maintaining the capacity to mediate RNAi. Exemplary nucleotides having a Northern configuration include locked nucleic acid (LNA) nucleotides (e.g., 2′-O, 4′-C-methylene-(D-ribofuranosyl) nucleotides), 2′-methoxyethyl (MOE) nucleotides, 2′-methyl-thio-ethyl, 2′-deoxy-2′-fluoro nucleotides, 2′-deoxy-2′-chloro nucleotides, 2′-azido nucleotides, 5-methyluridines, or 2′-O-methyl nucleotides. In certain embodiments, the LNA is a 5-methyluridine LNA or 2-thio-5-methyluridine LNA. In any of these embodiments, one or more substituted or modified nucleotides can be a G clamp (e.g., a cytosine analog that forms an additional hydrogen bond to guanine, such as 9-(aminoethoxy)phenoxazine; see, e.g., Lin and Mateucci, J. Am. Chem. Soc. 120:8531, 1998).

[0098] As described herein, the first and one or more second strands of a dsRNA molecule or analog thereof provided by this disclosure can anneal or hybridize together (i.e., due to complementarity between the strands) to form at least one double-stranded region having a length of about 4 to about 10 base pairs, about 5 to about 13 base pairs, or about 15 to about 40 base pairs. In some embodiments, the dsRNA has at least one double-stranded region ranging in length from about 15 to about 24 base pairs or about 19 to about 23 base pairs. In other embodiments, the dsRNA has at least one double-stranded region ranging in length from about 26 to about 40 base pairs or about 27 to about 30 base pairs or about 30 to about 35 base pairs. In other embodiments, the two or more strands of a dsRNA molecule of this disclosure may optionally be covalently linked together by nucleotide or non-nucleotide linker molecules.

[0099] In certain embodiments, the dsRNA molecule or analog thereof comprises an overhang of one to four nucleotides on one or both 3′-ends of the dsRNA, such as an overhang comprising a deoxyribonucleotide or two deoxyribonucleotides (e.g., thymidine, adenine). In certain embodiments, the 3′-end comprising one or more deoxyribonucleotide is in an mdRNA molecule and is either in the gap, not in the gap, or any combination thereof In some embodiments, dsRNA molecules or analogs thereof have a blunt end at one or both ends of the dsRNA. In certain embodiments, the 5′-end of the first or second strand is phosphorylated. In any of the embodiments of dsRNA molecules described herein, the 3′-terminal nucleotide overhangs can comprise ribonucleotides or deoxyribonucleotides that are chemically-modified at a nucleic acid sugar, base, or backbone. In any of the embodiments of dsRNA molecules described herein, the 3′-terminal nucleotide overhangs can comprise one or more universal base ribonucleotides. In any of the embodiments of dsRNA molecules described herein, the 3′-terminal nucleotide overhangs can comprise one or more acyclic nucleotides. In any of the embodiments of dsRNA molecules described herein, the dsRNA can further comprise a terminal phosphate group, such as a 5′-phosphate (see Martinez et al., Cell. 110:563-574, 2002; and Schwarz et al., Molec. Cell 10:537-568, 2002) or a 5′,3′-diphosphate.

[0100] As set forth herein, the terminal structure of dsRNAs of this disclosure that decrease expression of a BIRC5 gene by, for example, RNAi may either have blunt ends or one or more overhangs. In certain embodiments, the overhang may be at the 3′-end or the 5′-end. The total length of dsRNAs having overhangs is expressed as the sum of the length of the paired double-stranded portion together with the overhanging nucleotides. For example, if a 19 base pair dsRNA has a two nucleotide overhang at both ends, the total length is expressed as 21-mer. Furthermore, since the overhanging sequence may have low specificity to a BIRC5 gene, it is not necessarily complementary (antisense) or identical (sense) to a BIRC5 gene sequence. In further embodiments, a dsRNA of this disclosure that decreases expression of a BIRC5 gene by RNAi may further comprise a low molecular weight structure (e.g., a natural RNA molecule such as a tRNA, rRNA or viral RNA, or an artificial RNA molecule) at, for example, one or more overhanging portion of the dsRNA.

[0101] In further embodiments, a dsRNA molecule that decreases expression of an BIRC5 gene by RNAi according to the instant disclosure further comprises a 2′-sugar substitution, such as 2′-deoxy, 2′-O-methyl, 2′-O-methoxyethyl, 2′-O-2-methoxyethyl, halogen, 2′-fluoro, 2′-O-allyl, or the like, or any combination thereof. In still further embodiments, a dsRNA molecule that decreases expression of a BIRC5 gene by RNAi according to the instant disclosure further comprises a terminal cap substituent on one or both ends of the first strand or one or more second strands, such as an alkyl, abasic, deoxy abasic, glyceryl, dinucleotide, acyclic nucleotide, inverted deoxynucleotide moiety, or any combination thereof. In certain embodiments, at least one or two 5′-terminal ribonucleotides of the sense strand within the double-stranded region have a 2′-sugar substitution. In certain other embodiments, at least one or two 5′-terminal ribonucleotides of the antisense strand within the double-stranded region have a 2′-sugar substitution. In certain embodiments, at least one or two 5′-terminal ribonucleotides of the sense strand and the antisense strand within the double-stranded region have a 2′-sugar substitution.

[0102] In other embodiments, a dsRNA molecule that decreases expression of one or more target gene by RNAi according to the instant disclosure comprises one or more substitutions in the sugar backbone, including any combination of ribosyl, 2′-deoxyribosyl, a tetrofuranosyl (e.g., L-α-threofuranosyl), a hexopyranosyl (e.g., β-allopyranosyl, β-altropyranosyl, and β-glucopyranosyl), a pentopyranosyl (e.g., β-ribopyranosyl, α-lyxopyranosyl, β-xylopyranosyl, and α-arabinopyranosyl), a carbocyclic (carbon only ring) analog, a pyranose, a furanose, a morpholino, or analogs or derivatives thereof.

[0103] In yet other embodiments, a dsRNA molecule that decreases expression of a BIRC5 gene (including a mRNA splice variant thereof) by RNAi according to the instant disclosure further comprises at least one modified internucleoside linkage, such as independently a phosphorothioate, chiral phosphorothioate, phosphorodithioate, phosphotriester, aminoalkylphosphotriester, methyl phosphonate, alkyl phosphonate, 3′-alkylene phosphonate, 5′-alkylene phosphonate, chiral phosphonate, phosphonoacetate, thiophosphonoacetate, phosphinate, phosphoramidate, 3′-amino phosphoramidate, aminoalkylphosphoramidate, thionophosphoramidate, thionoalkylphosphonate, thionoalkylphosphotriester, selenophosphate, boranophosphate linkage, or any combination thereof.

[0104] A modified internucleotide linkage, as described herein, can be present in one or more strands of a dsRNA molecule of this disclosure, for example, in the sense strand, the antisense strand, both strands, or a plurality of strands (e.g., in an mdRNA). The dsRNA molecules of this disclosure can comprise one or more modified internucleotide linkages at the 3′-end, the 5′-end, or both of the 3′- and 5′-ends of the second sense strand, the third sense strand, the antisense strand or any combination of the antisense strand and one or more of the sense strands. In one embodiment, a dsRNA molecule capable of decreasing expression of a BIRC5 gene (including a specific or selected mRNA splice variant thereof) by RNAi has one modified internucleotide linkage at the 3′-end, such as a phosphorothioate linkage. For example, this disclosure provides a dsRNA molecule capable of decreasing expression of a BIRC5 gene by RNAi having about 1 to about 8 or more phosphorothioate internucleotide linkages in one dsRNA strand. In yet another embodiment, this disclosure provides a dsRNA molecule capable of decreasing expression of a BIRC5 gene by RNAi having about 1 to about 8 or more phosphorothioate internucleotide linkages in the dsRNA strands. In other embodiments, an exemplary dsRNA molecule of this disclosure can comprise from about 1 to about 5 or more consecutive phosphorothioate internucleotide linkages at the 5′-end of the sense strand, the antisense strand, both strands, or a plurality of strands. In another example, an exemplary dsRNA molecule of this disclosure can comprise one or more pyrimidine phosphorothioate internucleotide linkages in the sense strand, the antisense strand, either strand, or a plurality of strands. In yet another example, an exemplary dsRNA molecule of this disclosure comprises one or more purine phosphorothioate internucleotide linkages in the sense strand, the antisense strand, either strand, or a plurality of strands.

[0105] Many exemplary modified nucleotide bases or analogs thereof useful in the dsRNA of the instant disclosure include 5-methylcytosine; 5-hydroxymethylcytosine; xanthine; hypoxanthine; 2-aminoadenine; 6-methyl, 2-propyl, or other alkyl derivatives of adenine and guanine; 8-substituted adenines and guanines (such as 8-aza, 8-halo, 8-amino, 8-thiol, 8-thioalkyl, 8-hydroxyl, or the like); 7-methyl, 7-deaza, and 3-deaza adenines and guanines; 2-thiouracil; 2-thiothymine; 2-thiocytosine; 5-methyl, 5-propynyl, 5-halo (such as 5-bromo or 5-fluoro), 5-trifluoromethyl, or other 5-substituted uracils and cytosines; and 6-azouracil. Further useful nucleotide bases can be found in Kurreck, Eur. J. Biochem. 270:1628, 2003; Herdewijn, Antisense Nucleic Acid Develop. 10:297, 2000; Concise Encyclopedia of Polymer Science and Engineering, pages 858-859, Kroschwitz, J. I., ed. John Wiley & Sons, 1990; U.S. Pat. No. 3,687,808, and similar references.

[0106] Certain nucleotide base moieties are particularly useful for increasing the binding affinity of the dsRNA molecules of this disclosure to complementary targets. These include 5-substituted pyrimidines; 6-azapyrimidines; and N-2, N-6, or O-6 substituted purines (including 2-aminopropyladenine, 5-propynyluracil and 5-propynylcytosine). For example, 5-methyluridine and 5-methylcytosine substitutions are known to increase nucleic acid duplex stability, which can be combined with 2′-sugar modifications (such as 2′-methoxy or 2′-methoxyethyl) or internucleoside linkages (e.g., phosphorothioate) that provide nuclease resistance to the modified or substituted dsRNA.

[0107] In another aspect of the instant disclosure, there is provided a dsRNA that decreases expression of a BIRCS gene, comprising a first strand that is complementary to a BIRCS mRNA set forth in SEQ ID NO: 1158, 1159 or 1160and a second strand that is complementary to the first strand, wherein the first and second strands form a double-stranded region of about 15 to about 40 base pairs; wherein at least one pyrimidine of the dsRNA is substituted with a pyrimidine nucleoside according to Formula I or II:

[chemical structure]

wherein R¹ and R² are each independently a —H, —OH, —OCH₃, —OCH₂OCH₂CH₃, —OCH₂CH₂OCH₃, halogen, substituted or unsubstituted C₁-C₁₀ alkyl, alkoxy, alkoxyalkyl, hydroxyalkyl, carboxyalkyl, alkylsulfonylamino, aminoalkyl, dialkylamino, alkylaminoalkyl, dialkylaminoalkyl, haloalkyl, trifluoromethyl, cycloalkyl, (cycloalkyl)alkyl, substituted or unsubstituted C₂-C₁₀ alkenyl, substituted or unsubstituted —O-allyl, —O—CH₂CH═CH₂, —O—CH═CHCH₃, substituted or unsubstituted C₂-C₁₀ alkynyl, carbamoyl, carbamyl, carboxy, carbonylamino, substituted or unsubstituted aryl, substituted or unsubstituted aralkyl, —NH₂, —NO₂, —CN, or heterocyclo group; R³ and R⁴ are each independently a hydroxyl, a protected hydroxyl, or an internucleoside linking group; and R⁵ and R⁸ are each independently O or S. In certain embodiments, at least one nucleoside is according to Formula I in which R¹ is methyl and R² is —OH, or R¹ is methyl, R² is —OH, and R⁸ is S. In other embodiments, the internucleoside linking group covalently links from about 2 to about 40 nucleosides.

[0108] In certain embodiments, the first and one or more second strands of a dsRNA, which decreases expression of a BIRC5 gene by RNAi and has at least one pyrimidine substituted with a pyrimidine nucleoside according to Formula I or II, can anneal or hybridize together (i.e., due to complementarity between the strands) to form at least one double-stranded region having a length or a combined length of about 15 to about 40 base pairs. In some embodiments, the dsRNA has at least one double-stranded region ranging in length from about 4 base pairs to about 10 base pairs or about 5 to about 13 base pairs or about 15 to about 25 base pairs or about 19 to about 23 base pairs. In other embodiments, the dsRNA has at least one double-stranded region ranging in length from about 26 to about 40 base pairs or about 27 to about 30 base pairs or about 30 to about 35 base pairs. In certain embodiments, the dsRNA molecule or analog thereof has an overhang of one to four nucleotides on one or both 3′-ends, such as an overhang comprising a deoxyribonucleotide or two deoxyribonucleotides (e.g., thymidine). In some embodiments, dsRNA molecule or analog thereof has a blunt end at one or both ends of the dsRNA. In certain embodiments, the 5′-end of the first or second strand is phosphorylated.

[0109] In certain embodiments, at least one R¹ is a C₁-C₅ alkyl, such as methyl or ethyl. Within other exemplary embodiments of this disclosure, compounds of Formula I are a 5-alkyluridine (i.e., R¹ is alkyl, R² is —OH, and R³, R⁴, and R⁵ are as defined herein) or compounds of Formula II are a 5-alkylcytidine (i.e., R¹ is alkyl, R² is —OH, and R³, R⁴, and R⁵ are as defined herein). In related embodiments, the 5-alkyluridine is a 5-methyluridine (also referred to as ribothymidine or T^{r}—i.e., R¹ is methyl and R² is —OH), and the 5-alkylcytidine is a 5-methylcytidine. In other embodiments, at least one, at least three, or all uridines of the first strand of the dsRNA are replaced with 5-methyluridine, or at least one, at least three, or all uridines of the second strand of the dsRNA are replaced with 5-methyluridine, or any combination thereof (e.g., such changes are made on more than one strand). In certain embodiments, at least one pyrimidine nucleoside of Formula I or Formula II has an R⁵ that is S or R⁸ that is S.

[0110] In further embodiments, at least one pyrimidine nucleoside of the dsRNA is a locked nucleic acid (LNA) in the form of a bicyclic sugar, wherein R² is oxygen, and the 2′-O and 4′-C form an oxymethylene bridge on the same ribose ring. In a related embodiment, the LNA comprises a base substitution, such as a 5-methyluridine LNA or 2-thio-5-methyluridine LNA. In other embodiments, at least one, at least three, or all uridines of the first strand of the dsRNA are replaced with 5-methyluridine or 2-thioribothymidine or 5-methyluridine LNA or 2-thio-5-methyluridine LNA, or at least one, at least three, or all uridines of the second strand of the dsRNA are replaced with 5-methyluridine, 2-thioribothymidine, 5-methyluridine LNA, 2-thio-5-methyluridine LNA, or any combination thereof (e.g., such changes are made on both strands, or some substitutions include 5-methyluridine only, 2-thioribothymidine only, 5-methyluridine LNA only, 2-thio-5-methyluridine LNA only, or one or more 5-methyluridine or 2-thioribothymidine with one or more 5-methyluridine LNA or 2-thio-5-methyluridine LNA).

[0111] In further embodiments, a ribose of the pyrimidine nucleoside or the internucleoside linkage can be optionally modified. For example, compounds of Formula I or II are provided wherein R² is alkoxy, such as a 2′-O-methyl substitution (e.g., which may be in addition to a 5-alkyluridine or a 5-alkylcytidine, respectively). In certain embodiments, R² is selected from 2′-O—(C₁-C₅) alkyl, 2′-O-methyl, 2′-OCH₂OCH₂CH₃, 2′-OCH₂CH₂OCH₃, 2′-O-allyl, or 2′-fluoro. In further embodiments, one or more of the pyrimidine nucleosides are according to Formula I in which R¹ is methyl and R² is a 2′-O—(C₁-C₅) alkyl (e.g., 2′-O-methyl), or in which R¹ is methyl, R² is a 2′O—(C₁-C₅)alkyl (e.g., 2′O-methyl), and R² is S, or any combination thereof. In other embodiments, one or more, or at least two, pyrimidine nucleosides according to Formula I or II have an R² that is not —H or —OH and is incorporated at a 3′-end or 5′-end and not within the gap of one or more strands within the double-stranded region of the dsRNA molecule.

[0112] In further embodiments, a dsRNA molecule or analog thereof comprising a pyrimidine nucleoside according to Formula I or Formula II in which R² is not —H or —OH and an overhang, further comprises at least two of pyrimidine nucleosides that are incorporated either at a 3′-end or a 5′-end or both of one strand or two strands within the double-stranded region of the dsRNA molecule. In a related embodiment, at least one of the at least two pyrimidine nucleosides in which R² is not —H or —OH is located at a 3′-end or a 5′-end within the double-stranded region of at least one strand of the dsRNA molecule, and wherein at least one of the at least two pyrimidine nucleosides in which R² is not —H or —OH is located internally within a strand of the dsRNA molecule. In still further embodiments, a dsRNA molecule or analog thereof that has an overhang has a first of the two or more pyrimidine nucleosides in which R² is not —H or —OH that is incorporated at a 5′-end within the double-stranded region of the sense strand of the dsRNA molecule and a second of the two or more pyrimidine nucleosides is incorporated at a 5′-end within the double-stranded region of the antisense strand of the dsRNA molecule. In any of these embodiments, one or more substituted or modified nucleotides can be a G clamp (e.g., a cytosine analog that forms an additional hydrogen bond to guanine, such as 9-(aminoethoxy)phenoxazine; see, e.g., Lin and Mateucci, 1998). In any of these embodiments, provided the one or more pyrimidine nucleosides are not within the gap.

[0113] In yet other embodiments, a dsRNA molecule or analog thereof of Formula I or II according to the instant disclosure that has an overhang that comprises four or more independent pyrimidine nucleosides or four or more independent pyrimidine nucleosides in which R² is not —H or —OH, wherein (a) a first pyrimidine nucleoside is incorporated into a 3′-end within the double-stranded region of the sense (second) strand of the dsRNA, (b) a second pyrimidine nucleoside is incorporated into a 5′-end within the double-stranded region of the sense (second) strand, (c) a third pyrimidine nucleoside is incorporated into a 3′-end within the double-stranded region of the antisense (first) strand of the dsRNA, and (d) a fourth pyrimidine nucleoside is incorporated into a 5′-end within the double-stranded region of the antisense (first) strand. In any of these embodiments, provided the one or more pyrimidine nucleosides are not within the gap.

[0114] In further embodiments, a dsRNA molecule or analog thereof comprising a pyrimidine nucleoside according to Formula I or Formula II in which R² is not —H or —OH and is blunt-ended, further comprises at least two of pyrimidine nucleosides that are incorporated either at a 3′-end or a 5′-end or both of one strand or two strands of the dsRNA molecule. In a related embodiment, at least one of the at least two pyrimidine nucleosides in which R² is not —H or —OH is located at a 3′-end or a 5′-end of at least one strand of the dsRNA molecule, and wherein at least one of the at least two pyrimidine nucleosides in which R² is not —H or —OH is located internally within a strand of the dsRNA molecule. In still further embodiments, a dsRNA molecule or analog thereof that is blunt-ended has a first of the two or more pyrimidine nucleosides in which R² is not —H or —OH that is incorporated at a 5′-end of the sense strand of the dsRNA molecule and a second of the two or more pyrimidine nucleosides is incorporated at a 5′-end of the antisense strand of the dsRNA molecule. In any of these embodiments, provided the one or more pyrimidine nucleosides are not within the gap.

[0115] In yet other embodiments, a dsRNA molecule comprising a pyrimidine nucleoside according to Formula I or Formula II and that is blunt-ended comprises four or more independent pyrimidine nucleosides or four or more independent pyrimidine nucleosides in which R² is not —H or —OH, wherein (a) a first pyrimidine nucleoside is incorporated into a 3′-end within the double-stranded region of the sense (second) strand of the dsRNA, (b) a second pyrimidine nucleoside is incorporated into a 5′-end within the double-stranded region of the sense (second) strand, (c) a third pyrimidine nucleoside is incorporated into a 3′-end within the double-stranded region of the antisense (first) strand of the dsRNA, and (d) a fourth pyrimidine nucleoside is incorporated into a 5′-end within the double-stranded region of the antisense (first) strand. In any of these embodiments, provided the one or more pyrimidine nucleosides are not within the gap.

[0116] In still further embodiments, a dsRNA molecule or analog thereof of Formula I or II according to the instant disclosure further comprises a terminal cap substituent on one or both ends of the first strand or second strand, such as an alkyl, abasic, deoxy abasic, glyceryl, dinucleotide, acyclic nucleotide, inverted deoxynucleotide moiety, or any combination thereof In further embodiments, one or more internucleoside linkage can be optionally modified. For example, a dsRNA molecule or analog thereof of Formula I or II according to the instant disclosure wherein at least one internucleoside linkage is modified to a phosphorothioate, chiral phosphorothioate, phosphorodithioate, phosphotriester, aminoalkylphosphotriester, methyl phosphonate, alkyl phosphonate, 3′-alkylene phosphonate, 5′-alkylene phosphonate, chiral phosphonate, phosphonoacetate, thiophosphonoacetate, phosphinate, phosphoramidate, 3′-amino phosphoramidate, aminoalkylphosphoramidate, thionophosphoramidate, thionoalkylphosphonate, thionoalkylphosphotriester, selenophosphate, boranophosphate linkage, or any combination thereof.

[0117] In still another embodiment, a nicked or gapped dsRNA molecule (ndsRNA or gdsRNA, respectively) that decreases expression of a BIRC5 gene by RNAi, comprising a first strand that is complementary to a BIRC5 mRNA set forth in SEQ ID NO: 1158, 1159 or 1160and two or more second strands that are complementary to the first strand, wherein the first and at least one of the second strands form a non-overlapping double-stranded region of about 5 to about 13 base pairs. Any of the substitutions or modifications described herein is contemplated within this embodiment as well.

[0118] In another exemplary of this disclosure, the dsRNAs comprise at least two or more substituted pyrimidine nucleosides can each be independently selected wherein R¹ comprises any chemical modification or substitution as contemplated herein, for example an alkyl (e.g., methyl), halogen, hydroxy, alkoxy, nitro, amino, trifluoromethyl, cycloalkyl, (cycloalkyl)alkyl, alkanoyl, alkanoyloxy, aryl, aroyl, aralkyl, nitrile, dialkylamino, alkenyl, alkynyl, hydroxyalkyl, aminoalkyl, alkylaminoalkyl, dialkylaminoalkyl, haloalkyl, carboxyalkyl, alkoxyalkyl, carboxy, carbonyl, alkanoylamino, carbamoyl, carbonylamino, alkylsulfonylamino, or heterocyclo group. When two or more modified ribonucleotides are present, each modified ribonucleotide can be independently modified to have the same, or different, modification or substitution at R¹ or R².

[0119] In other detailed embodiments, one or more substituted pyrimidine nucleosides according to Formula I or II can be located at any ribonucleotide position, or any combination of ribonucleotide positions, on either or both of the sense and antisense strands of a dsRNA molecule of this disclosure, including at one or more multiple terminal positions as noted above, or at any one or combination of multiple non-terminal (“internal”) positions. In this regard, each of the sense and antisense strands can incorporate about 1 to about 6 or more of the substituted pyrimidine nucleosides.

[0120] In certain embodiments, when two or more substituted pyrimidine nucleosides are incorporated within a dsRNA of this disclosure, at least one of the substituted pyrimidine nucleosides will be at a 3′- or 5′-end of one or both strands, and in certain embodiments at least one of the substituted pyrimidine nucleosides will be at a 5′-end of one or both strands. In other embodiments, the substituted pyrimidine nucleosides are located at a position corresponding to a position of a pyrimidine in an unmodified dsRNA that is constructed as a homologous sequence for targeting a cognate mRNA, as described herein.

[0121] In addition, the terminal structure of the dsRNAs of this disclosure may have a stem-loop structure in which ends of one side of the dsRNA molecule are connected by a linker nucleic acid, e.g., a linker RNA. The length of the double-stranded region (stem-loop portion) can be, for example, about 15 to about 49 bp, about 15 to about 35 bp, or about 21 to about 30 by long. Alternatively, the length of the double-stranded region that is a final transcription product of dsRNAs to be expressed in a target cell may be, for example, approximately about 15 to about 49 bp, about 15 to about 35 bp, or about 21 to about 30 by long. When linker segments are employed, there is no particular limitation in the length of the linker as long as it does not hinder pairing of the stem portion. For example, for stable pairing of the stem portion and suppression of recombination between DNAs coding for this portion, the linker portion may have a clover-leaf tRNA structure. Even if the linker has a length that would hinder pairing of the stem portion, it is possible, for example, to construct the linker portion to include introns so that the introns are excised during processing of a precursor RNA into mature RNA, thereby allowing pairing of the stem portion. In the case of a stem-loop dsRNA, either end (head or tail) of RNA with no loop structure may have a low molecular weight RNA. As described above, these low molecular weight RNAs may include a natural RNA molecule, such as tRNA, rRNA or viral RNA, or an artificial RNA molecule.

[0122] A dsRNA molecule may be comprised of a circular nucleic acid molecule, wherein the dsRNA is about 38 to about 70 nucleotides in length having from about 18 to about 23 base pairs (e.g., about 19 to about 21 bp) wherein the circular oligonucleotide forms a dumbbell shaped structure having about 19 base pairs and two loops. In certain embodiments, a circular dsRNA molecule contains two loop motifs wherein one or both loop portions of the dsRNA molecule is biodegradable. For example, a circular dsRNA molecule of this disclosure is designed such that degradation of the loop portions of the dsRNA molecule in vivo can generate a dsRNA molecule with 3′-terminal overhangs, such as 3′-terminal nucleotide overhangs comprising from about 1 to about 4 (unpaired) nucleotides.

[0123] Substituting or modifying nucleosides of a dsRNA according to this disclosure can result in increased resistance to enzymatic degradation, such as exonucleolytic degradation, including 5′-exonucleolytic or 3′-exonucleolytic degradation. As such, in some embodiments, the dsRNAs described herein will exhibit significant resistance to enzymatic degradation compared to a corresponding dsRNA having standard nucleotides, and will thereby possess greater stability, increased half-life, and greater bioavailability in physiological environments (e.g., when introduced into a eukaryotic target cell). In addition to increasing resistance of the substituted or modified dsRNAs to exonucleolytic degradation, the incorporation of one or more pyrimidine nucleosides according to Formula I or II will render dsRNAs more resistant to other enzymatic or chemical degradation processes and thus more stable and bioavailable than otherwise identical dsRNAs that do not include the substitutions or modifications. In related aspects of this disclosure, dsRNA substitutions or modifications described herein will often improve stability of a modified dsRNA for use within research, diagnostic and treatment methods wherein the modified dsRNA is contacted with a biological sample, for example, a mammalian cell, intracellular compartment, serum or other extracellular fluid, tissue, or other in vitro or in vivo physiological compartment or environment. In one embodiment, diagnosis is performed on an isolated biological sample. In another embodiment, the diagnostic method is performed in vitro. In a further embodiment, the diagnostic method is not performed (directly) on a human or animal body.

[0124] In addition to increasing stability of substituted or modified dsRNAs, incorporation of one or more pyrimidine nucleosides according to Formula I or II in a dsRNA designed for gene silencing can provide additional desired functional results, including increasing a melting point of a substituted or modified dsRNA compared to a corresponding unmodified dsRNA. In another aspect of this disclosure, certain substitutions or modifications of dsRNAs described herein can reduce “off-target effects” of the substituted or modified dsRNA molecules when they are contacted with a biological sample (e.g., when introduced into a target eukaryotic cell having specific, and non-specific mRNA species present as potential specific and non-specific targets). In yet another aspect of this disclosure, the dsRNA substitutions or modifications described herein can reduce interferon activation by the dsRNA molecule when the dsRNA is contacted with a biological sample, e.g., when introduced into a eukaryotic cell.

[0125] In further embodiments, dsRNAs of this disclosure can comprise one or more sense (second) strand that is homologous or corresponds to a sequence of a target gene (e.g., a BIRC5) and an antisense (first) strand that is complementary to the sense strand and a sequence of the target gene (e.g., a BIRC5). In exemplary embodiments, at least one strand of the dsRNA incorporates one or more pyrimidines substituted according to Formula I or II (e.g., wherein the pyrimidine is one or more 5-methyluridines or 2-thioribothymidines, the ribose is modified to incorporate one or more 2′-O-methyl substitutions, or any combination thereof). These and other multiple substitutions or modifications according to Formula I or II can be introduced into one or more pyrimidines, or into any combination and up to all pyrimidines present in one or more strands of a dsRNA of the instant disclosure, so long as the dsRNA has or retains RNAi activity similar to or better than the activity of an unmodified dsRNA.

[0126] In any of the embodiments described herein, the dsRNA may include multiple modifications. For example, a dsRNA having at least one ribothymidine or 2′-O-methyl-5-methyluridine may further comprise at least one LNA, 2′-methoxy, 2′-fluoro, 2′-deoxy, phosphorothioate linkage, an inverted base terminal cap, or any combination thereof. In certain embodiments, a dsRNA will have from one to all ribothymidines and have up to 75% LNA. In other embodiments, a dsRNA will have from one to all ribothymidines and have up to 75% 2′-methoxy (e.g., not at the Argonaute cleavage site). In still other embodiments, a dsRNA will have from one to all ribothymidines and have up to 100% 2′-fluoro. In further embodiments, a dsRNA will have from one to all ribothymidines and have up to 75% 2′-deoxy. In further embodiments, a dsRNA will have up to 75% LNA and have up to 75% 2′-methoxy. In still other embodiments, a dsRNA will have up to 75% LNA and have up to 100% 2′-fluoro. In further embodiments, a dsRNA will have up to 75% LNA and have up to 75% 2′-deoxy. In other embodiments, a dsRNA will have up to 75% 2′-methoxy and have up to 100% 2′-fluoro. In more embodiments, a dsRNA will have up to 75% 2′-methoxy and have up to 75% 2′-deoxy. In further embodiments, a dsRNA will have up to 100% 2′-fluoro and have up to 75% 2′-deoxy.

[0127] In further multiple modification embodiments, a dsRNA will have from one to all ribothymidines, up to 75% LNA, and up to 75% 2′-methoxy. In still further embodiments, a dsRNA will have from one to all ribothymidines, up to 75% LNA, and up to 100% 2′-fluoro. In further embodiments, a dsRNA will have from one to all ribothymidines, up to 75% LNA, and up to about 75% 2′-deoxy. In further embodiments, a dsRNA will have from one to all ribothymidines, up to 75% 2′-methoxy, and up to 75% 2′-fluoro. In further embodiments, a dsRNA will have from one to all ribothymidines, up to 75% 2′-methoxy, and up to 75% 2′-deoxy. In further embodiments, a dsRNA will have from one to all ribothymidines, up to 100% 2′-fluoro, and up to 75% 2′-deoxy. In yet further embodiments, a dsRNA will have from one to all ribothymidines, up to 75% LNA substitutions, up to 75% 2′-methoxy, up to 100% 2′-fluoro, and up to 75% 2′-deoxy. In other embodiments, a dsRNA will have up to 75% LNA, up to 75% 2′-methoxy, and up to 100% 2′-fluoro. In further embodiments, a dsRNA will have up to 75% LNA, up to 75% 2′-methoxy, and up to about 75% 2′-deoxy. In further embodiments, a dsRNA will have up to 75% LNA, up to 100% 2′-fluoro, and up to 75% 2′-deoxy. In still further embodiments, a dsRNA will have up to 75% 2′-methoxy, up to 100% 2′-fluoro, and up to 75% 2′-deoxy.

[0128] In any of these exemplary methods for using multiply modified dsRNA, the dsRNA may further comprise up to 100% phosphorothioate internucleoside linkages, from one to ten or more inverted base terminal caps, or any combination thereof. Additionally, any of these dsRNA may have these multiple modifications on one strand, two strands, three strands, a plurality of strands, or all strands, or on the same or different nucleoside within a dsRNA molecule. Finally, in any of these multiple modification dsRNA, the dsRNA must have gene silencing activity.

[0129] Within certain aspects, the present disclosure provides dsRNA that decreases expression of a BIRC5 gene by RNAi (e.g., an BIRC5 of SEQ ID NO: 1158, 1159 or 1160), and compositions comprising one or more dsRNA, wherein at least one dsRNA comprises one or more universal-binding nucleotide(s) in the first, second or third position in the anti-codon of the antisense or sense strand of the dsRNA and wherein the dsRNA is capable of specifically binding to an BIRC5 sequence, such as an RNA expressed by a target cell. In cases wherein the sequence of a target BIRC5 RNA includes one or more single nucleotide substitutions, dsRNA comprising a universal-binding nucleotide retains its capacity to specifically bind a target BIRC5 RNA, thereby mediating gene silencing and, as a consequence, overcoming escape of the target BIRC5 from dsRNA-mediated gene silencing. Examplary universal-binding nucleotides that may be suitably employed in the compositions and methods disclosed herein include inosine, 1-β-D-ribofuranosyl-5-nitroindole, or 1-β-D-ribofuranosyl-3-nitropyrrole.

[0130] In certain aspects, dsRNA disclosed herein can include between about 1 universal-binding nucleotide and about 10 universal-binding nucleotides. Within other aspects, the presently disclosed dsRNA may comprise a sense strand that is homologous to a sequence of a BIRC5 gene and an antisense strand that is complementary to the sense strand, with the proviso that at least one nucleotide of the antisense or sense strand of the otherwise complementary dsRNA duplex has one or more universal-binding nucleotide.

[0131] In certain aspects, dsRNA disclosed herein comprises one or more hydroxymethyl modified nucleomonomer(s) (see chemical formulas below). Hereunder as one such example is an acyclic nucleomonomer, more preferably an acyclic monomer selected from the group consisting of monomers D, F, G, H, I, and J. Thus, the embodiments described in the first aspect with regards to hydroxymethyl modified nucleomonomers will apply for other embodiments relating to acyclic nucleomonomers.

[0132] As used herein, the terms “hydroxylmethyl substituted nucleomonomers”, “hydroxylmethyl substituted monomers”, “acyclic nucleomonomers”, “acyclic monomers”, “acyclic hydroxymethyl subsitituted nucleomoners”, “nucleobase analog monomers” may be used interchangeably throughout.

[chemical structure]

[chemical structure]

[0133] R, in the above structures, is selected from the group consisting of hydrogen, methyl group, C(1-10) alkyl, cholesterol, naturally or non-naturally occurring amino acid, sugar, vitamin, flurophore, polyamine and fatty acid.

[0134] In certain aspects, a dsRNA having one or more hydroxymethyl modified nucleomonomer(s) has increased potency, reduced off-target effects, reduced immune stimulation, increased stability for storage, increased stability in biological media like serum, increased duration of action and/or improved pharmacokinetic properties, all relative to the native unmodified form of the dsRNA.

[0135] In certan aspects, the antisense (guide strand) of a dsRNA comprises one or more hydroxymethyl modified nucleomonomer(s). In certain aspects, the antisense of a dsRNA comprises 1, 2, 3, 4, 5, 6, 7, 8, 9 or 10 hydroxymethyl modified nucleomonomer(s). In certain aspects, the entire antisense of a dsRNA comprises hydroxymethyl modified nucleomonomer(s). In certain aspects, a hydroxymethyl modified nucleomonomer in the antisense strand is present in positions 1, 2, 3, 4, 5, 6, 7, and/or 8 wherein the positions are counted from the 5′-end of the antisense strand. In certain aspects, a hydroxymethyl modified nucleomonomer in the antisense strand is present in positions 3, 4, 5, 6, 7, and/or 8 wherein the positions are counted from the 5′-end of the antisense strand. In certain aspects, a hydroxymethyl modified nucleomonomer in the antisense strand is present in positions 7 and/or 8 wherein the positions are counted from the 5′-end of the antisense strand.

[0136] In certain aspects, a hydroxymethyl modified nucleomonomer in the antisense strand is present in positions 9, 10, 11, 12, 13, 14, 15, and/or 16 wherein the positions are counted from the 5′-end of the antisense strand. In certain aspects, a hydroxymethyl modified nucleomonomer in the antisense strand is present in positions 9, 10, and/or 11, wherein the positions are counted from the 5′-end of the antisense strand. In certain aspects, a hydroxymethyl modified nucleomonomer in the antisense strand is present in positions 1, 2, 3, 4, 5, 6, 7, 8, 9, 10, 11, 12, 13, 14, 15, 16, and/or 17, wherein the positions are counted from the 5′-end of the antisense strand. In certain aspects, a hydroxymethyl modified nucleomonomer in the antisense strand is present in positions 1, 2, 3, 4, 5, 6, 7, 8, 9 and/or 10, wherein the positions are counted from the 3′-end of the antisense strand.

[0137] In certain aspects, the sense (passenger strand) of a dsRNA comprises one or more hydroxymethyl modified nucleomonomer(s). In certain aspects, the sense (passenger strand) of a dsRNA comprises 1, 2, 3, 4, 5, 6, 7, 8, 9 or 10 hydroxymethyl modified nucleomonomer(s). In certain aspects, the entire sense (passenger strand) of a dsRNA comprises hydroxymethyl modified nucleomonomer(s). In certain aspects, a hydroxymethyl modified nucleomonomer in the sense strand is present in positions 1, 2, 3, 4, 5, 6, 7, and/or 8 wherein the positions are counted from the 5′-end of the sense strand. In certain aspects, a hydroxymethyl modified nucleomonomer in the sense strand is present in positions 3, 4, 5, 6, 7, and/or 8 wherein the positions are counted from the 5′-end of the sense strand. In certain aspects, a hydroxymethyl modified nucleomonomer in the sense strand is present in positions 7 and/or 8 wherein the positions are counted from the 5′-end of the sense strand. In certain aspects, a hydroxymethyl modified nucleomonomer in the sense strand is present in positions 9, 10, 11, 12, 13, 14, 15, and/or 16 wherein the positions are counted from the 5′-end of the sense strand. In certain aspects, a hydroxymethyl modified nucleomonomer in the sense strand is present in positions 9, 10, and/or 11, wherein the positions are counted from the 5′-end of the sense strand.). In certain aspects, a hydroxymethyl modified nucleomonomer in the sense strand is present in positions 19, 20, 21, 22, 23, 24, 25, 26, 27, 28, 29, 30, 31 and/or 32 wherein the positions are counted from the 5′-end of the sense strand. In certain aspects, a hydroxymethyl modified nucleomonomer in the sense strand is present in positions 1, 2, 3, 4, 5, 6, 7, 8, 9 and/or 10, wherein the positions are counted from the 3′-end of the sense strand.

[0138] In certain aspects, the first, second and/or third strands of an mdRNA having a nick or gap comprises one or more hydroxymethyl modified nucleomonomer(s). In certain aspects, the first, second and/or third strands of an mdRNA comprises 1, 2, 3, 4, 5, 6, 7, 8, 9 or 10 hydroxymethyl modified nucleomonomer(s). In certain aspects, the entire first strand of an mdRNA comprises hydroxymethyl modified nucleomonomer(s). In certain aspects, a hydroxymethyl modified nucleomonomer in the first strand is present in positions 1, 2, 3, 4, 5, 6, 7, and/or 8 wherein the positions are counted from the 5′-end of the first strand. In certain aspects, a hydroxymethyl modified nucleomonomer in the first strand is present in positions 9, 10, 11, 12, 13, 14, 15, and/or 16 wherein the positions are counted from the 5′-end of the first strand.

[0139] In certain aspects, the dsRNA has at least one blunt end having one or more a hydroxymethyl modified nucleomonomer(s) covalently linked to the blunt end. In certain aspects, the dsRNA has two blunt ends each having one or more a hydroxymethyl modified nucleomonomer(s) covalently linked to each blunt end. In certain aspects, a blunt end has 1, 2, 3, 4, 5, 6, 7, 8 or more hydroxymethyl modified nucleomonomers covalently linked to the blunt end. In certain aspects, a blunt end has two hydroxymethyl modified nucleomonomers covalently linked to the blunt end. In certain aspects, the one or more a hydroxymethyl modified nucleomonomer(s) are covalently linked to the 5′-end of the antisense strand. In certain aspects, the one or more a hydroxymethyl modified nucleomonomer(s) are covalently linked to the 3′-end of the antisense strand. In certain aspects, the one or more a hydroxymethyl modified nucleomonomer(s) are covalently linked to the 5′-end and the 3′-end of the antisense strand. In certain aspects, the one or more a hydroxymethyl modified nucleomonomer(s) are covalently linked to the 5′-end of the sense strand. In certain aspects, the one or more a hydroxymethyl modified nucleomonomer(s) are covalently linked to the 3′-end of the sense strand. In certain aspects, the one or more a hydroxymethyl modified nucleomonomer(s) are covalently linked to the 5′-end and the 3′-end of the sense strand. In certain aspects, the one or more a hydroxymethyl modified nucleomonomer(s) are covalently linked to the 3′-end of the sense strand and the 3′-end of the antisense strand. In certain aspects, the one or more a hydroxymethyl modified nucleomonomer(s) are covalently linked to the 5′-end of the sense strand and the 5′-end of the antisense strand. In certain aspects, the one or more a hydroxymethyl modified nucleomonomer(s) are covalently linked to the 3′-end of the sense strand and the 5′-end of the antisense strand. In certain aspects, the one or more a hydroxymethyl modified nucleomonomer(s) are covalently linked to the 5′-end of the sense strand and the 3′-end of the antisense strand.

[0140] In certain aspects, the mdRNA has at least one blunt end having one or more a hydroxymethyl modified nucleomonomer(s) covalently linked to the blunt end. In certain aspects, the mdRNA has two blunt ends each having one or more a hydroxymethyl modified nucleomonomer(s) covalently linked to each blunt end. In certain aspects, a blunt end has 1, 2, 3, 4, 5, 6, 7, 8 or more hydroxymethyl modified nucleomonomers covalently linked to the blunt end. In certain aspects, a blunt end has two hydroxymethyl modified nucleomonomers covalently linked to the blunt end. In certain aspects, the one or more a hydroxymethyl modified nucleomonomer(s) are covalently linked to the 5′-end of the antisense strand. In certain aspects, the one or more a hydroxymethyl modified nucleomonomer(s) are covalently linked to the 3′-end of the antisense strand. In certain aspects, the one or more a hydroxymethyl modified nucleomonomer(s) are covalently linked to the 5′-end and the 3′-end of the antisense strand. In certain aspects, the one or more a hydroxymethyl modified nucleomonomer(s) are covalently linked to the 5′-end of one or both of the sense strands of an mdRNA. In certain aspects, the one or more a hydroxymethyl modified nucleomonomer(s) are covalently linked to the 3′-end of one or both of the sense strands of an mdRNA. In certain aspects, the one or more a hydroxymethyl modified nucleomonomer(s) are covalently linked to the 5′-end and the 3′-end of one or both of the sense strands of an mdRNA. In certain aspects, the one or more a hydroxymethyl modified nucleomonomer(s) are covalently linked to the 3′-end of one or both of the sense strands, and the 3′-end of the antisense strand of an mdRNA. In certain aspects, the one or more a hydroxymethyl modified nucleomonomer(s) are covalently linked to the 5′-end of one or both of the sense strands, and the 5′-end of the antisense strand of an mdRNA. In certain aspects, the one or more a hydroxymethyl modified nucleomonomer(s) are covalently linked to the 3′-end of one or both of the sense strands, and the 5′-end of the antisense strand of the mdRNA. In certain aspects, the one or more a hydroxymethyl modified nucleomonomer(s) are covalently linked to the 5′-end of one or both of the sense strands, and the 3′-end of the antisense strand of an mdRNA.

[0141] In certain aspects, the dsRNA comprises hydroxymethyl substituted monomers at one or more position(s) that prevent and/or reduce dicer enzyme processing of the dsRNA compared to an unmodified form of the dsRNA.

[0142] In certain aspects, the dsRNA comprises hydroxymethyl substituted monomers at one or more position(s) that prevent and/or reduce cytokine induction by the dsRNA compared to an unmodified form of the dsRNA.

[0143] In certain aspects, the dsRNA comprises hydroxymethyl substituted monomers at one or more position(s) that improves and/or enhances the potency or target message knockdown activity of the dsRNA compared to an unmodified form of the dsRNA.

[0144] In certain aspects, the dsRNA comprises hydroxymethyl substituted monomers at one or more position(s) that prevent and/or reduce off-target effect by the dsRNA compared to an unmodified form of the dsRNA.

[0145] In certain aspects, the dsRNA comprises hydroxymethyl substituted monomers at one or more position(s) that improves and/or enhances the stability of the dsRNA in serum compared to an unmodified form of the dsRNA.

[0146] The contents of PCT patent application PCT/US2008/064417, for example FIG. 1, are hereby incoroporated by reference in its entirety. Monomers disclosed in PCT/US2008/064417, for example FIG. 1, may be used in combination the dsRNA molecules disclosed herein and used in combination with any modification disclosed herein. Examples monomers include the following:

[chemical structure]

### Synthesis of Nucleic Acid Molecules

[0147] Exemplary molecules of the instant disclosure are recombinantly produced, chemically synthesized, or a combination thereof. Oligonucleotides (e.g., certain modified oligonucleotides or portions of oligonucleotides lacking ribonucleotides) are synthesized using protocols known in the art, for example as described in Caruthers et al., Methods in Enzymol. 211:3-19, 1992; Thompson et al., PCT Publication No. WO 99/54459, Wincott et al., Nucleic Acids Res. 23:2677-2684, 1995; Wincott et al., Methods Mol. Bio. 74:59, 1997; Brennan et al., Biotechnol Bioeng. 61:33-45, 1998; and Brennan, U.S. Pat. No. 6,001,311. Synthesis of RNA, including certain dsRNA molecules and analogs thereof of this disclosure, can be made using the procedure as described in Usman et al., J. Am. Chem. Soc. 109:7845, 1987; Scaringe et al., Nucleic Acids Res. 18:5433, 1990; and Wincott et al., Nucleic Acids Res. 23:2677-2684, 1995; Wincott et al., Methods Mol. Bio. 74:59, 1997.

[0148] In certain embodiments, the nucleic acid molecules of the present disclosure can be synthesized separately and joined together post-synthetically, for example, by ligation (Moore et al., Science 256:9923, 1992; Draper et al., PCT Publication No. WO 93/23569; Shabarova et al., Nucleic Acids Res. 19:4247, 1991; Bellon et al., Nucleosides & Nucleotides 16:951, 1997; Bellon et al., Bioconjugate Chem. 8:204, 1997), or by hybridization following synthesis or deprotection.

[0149] In further embodiments, dsRNAs of this disclosure that decrease expression of a BIRC5 gene by RNAi can be made as single or multiple transcription products expressed by a polynucleotide vector encoding one or more dsRNAs and directing their expression within host cells. In these embodiments the double-stranded portion of a final transcription product of the dsRNAs to be expressed within the target cell can be, for example, about 5 to about 40 bp, about 15 to about 24 bp, or about 25 to about 40 by long. Within exemplary embodiments, double-stranded portions of dsRNAs, in which two or more strands pair up, are not limited to completely paired nucleotide segments, and may contain non-pairing portions due to a mismatch (the corresponding nucleotides are not complementary), bulge (lacking in the corresponding complementary nucleotide on one strand), overhang, or the like. Non-pairing portions can be contained to the extent that they do not interfere with dsRNA formation and function. In certain embodiments, a “bulge” may comprise 1 to 2 non-pairing nucleotides, and the double-stranded region of dsRNAs in which two strands pair up may contain from about 1 to 7, or about 1 to 5 bulges. In addition, “mismatch” portions contained in the double-stranded region of dsRNAs may include from about 1 to 7, or about 1 to 5 mismatches. In other embodiments, the double-stranded region of dsRNAs of this disclosure may contain both bulge and mismatched portions in the approximate numerical ranges specified herein.

[0150] A dsRNA or analog thereof of this disclosure may be further comprised of a nucleotide, non-nucleotide, or mixed nucleotide/non-nucleotide linker that joins the sense region of the dsRNA to the antisense region of the dsRNA. In one embodiment, a nucleotide linker can be a linker of more than about 2 nucleotides length up to about 10 nucleotides in length. In another embodiment, the nucleotide linker can be a nucleic acid aptamer. By “aptamer” or “nucleic acid aptamer” as used herein is meant a nucleic acid molecule that binds specifically to a target molecule wherein the nucleic acid molecule has sequence that comprises a sequence recognized by the target molecule in its natural setting. Alternately, an aptamer can be a nucleic acid molecule that binds to a target molecule wherein the target molecule does not naturally bind to a nucleic acid. The target molecule can be any molecule of interest. For example, the aptamer can be used to bind to a ligand-binding domain of a protein, thereby preventing interaction of the naturally occurring ligand with the protein. This is a non-limiting example and those in the art will recognize that other embodiments can be readily generated using techniques generally known in the art (see, e.g., Gold et al., Annu. Rev. Biochem. 64:763, 1995; Brody and Gold, J. Biotechnol. 74:5, 2000; Sun, Curr. Opin. Mol. Ther. 2:100, 2000; Kusser, J. Biotechnol. 74:27, 2000; Hermann and Patel, Science 287:820, 2000; and Jayasena, Clinical Chem. 45:1628, 1999).

[0151] A non-nucleotide linker may be comprised of an abasic nucleotide, polyether, polyamine, polyamide, peptide, carbohydrate, lipid, polyhydrocarbon, or other polymeric compounds (e.g., polyethylene glycols such as those having between 2 and 100 ethylene glycol units). Specific examples include those described by Seela and Kaiser, Nucleic Acids Res. 18:6353, 1990, and Nucleic Acids Res. 15:3113, 1987; Cload and Schepartz, J. Am. Chem. Soc. 113:6324, 1991; Richardson and Schepartz, J. Am. Chem. Soc. 113:5109, 1991; Ma et al., Nucleic Acids Res. 21:2585, 1993, and Biochemistry 32:1751, 1993; Durand et al., Nucleic Acids Res. 18:6353, 1990; McCurdy et al., Nucleosides & Nucleotides 10:287, 1991; Jaschke et al., Tetrahedron Lett. 34:301, 1993; Ono et al., Biochemistry 30:9914, 1991; Arnold et al., PCT Publication No. WO 89/02439; Usman et al., PCT Publication No. WO 95/06731; Dudycz et al., PCT Publication No. WO 95/11910 and Ferentz and Verdine, J. Am. Chem. Soc. 113:4000, 1991. The synthesis of a dsRNA molecule of this disclosure, which can be further modified, comprises: (a) synthesis of a first (antisense) strand and synthesis of a second (sense) strand and a third (sense) strand that are each complementary to non-overlapping regions of the first strand; and (b) annealing the first, second and third strands together under conditions suitable to obtain a dsRNA molecule. In another embodiment, synthesis of the first, second and third strands of a dsRNA molecule is by solid phase oligonucleotide synthesis. In yet another embodiment, synthesis of the first, second, and third strands of a dsRNA molecule is by solid phase tandem oligonucleotide synthesis.

[0152] Chemically synthesizing nucleic acid molecules with substitutions or modifications (base, sugar, phosphate, or any combination thereof) can prevent their degradation by serum ribonucleases, which may lead to increased potency. See, e.g., Eckstein et al., PCT Publication No. WO 92/07065; Perrault et al., Nature 344:565, 1990; Pieken et al., Science 253:314, 1991; Usman and Cedergren, Trends in Biochem. Sci. 17:334, 1992; Usman et al., Nucleic Acids Symp. Ser. 31:163, 1994; Beigelman et al., J. Biol. Chem. 270:25702, 1995; Burgin et al., Biochemistry 35:14090, 1996; Burlina et al., Bioorg. Med. Chem. 5:1999, 1997; Thompson et al., Karpeisky et al., Tetrahedron Lett. 39:1131, 1998; Earnshaw and Gait, Biopolymers (Nucleic Acid Sciences) 48:39-55, 1998; Verma and Eckstein, Annu. Rev. Biochem. 67:99-134, 1998; Herdewijn, Antisense Nucleic Acid Drug Dev. 10:297, 2000; Kurreck, Eur. J. Biochem. 270:1628, 2003; Dorsett and Tuschl, Nature Rev. Drug Discov. 3:318, 2004; PCT Publication Nos. WO 91/03162; WO 93/15187; WO 97/26270; WO 98/13526; U.S. Pat. Nos. 5,334,711; 5,627,053; 5,716,824; 5,767,264; 6,300,074. Each of the above references discloses various substitutions and chemical modifications to the base, phosphate, or sugar moieties of nucleic acid molecules, which can be used in the dsRNAs described herein. For example, oligonucleotides can be modified at the sugar moiety to enhance stability or prolong biological activity by increasing nuclease resistance. Representative sugar modifications include 2′-amino, 2′-C-allyl, 2′-fluoro, 2′-O-methyl, 2′-O-allyl, or 2′-H. Other modifications to enhance stability or prolong biological activity can be internucleoside linkages, such as phosphorothioate, or base-modifications, such as locked nucleic acids (see, e.g., U.S. Pat. Nos. 6,670,461; 6,794,499; 6,268,490), or 5-methyluridine or 2′-O-methyl-5-methyluridine in place of uridine (see, e.g., U.S. Patent Application Publication No. 2006/0142230). Hence, dsRNA molecules of the instant disclosure can be modified to increase nuclease resistance or duplex stability while substantially retaining or having enhanced RNAi activity as compared to unmodified dsRNA.

[0153] In one embodiment, this disclosure features substituted or modified dsRNA molecules, such as phosphate backbone modifications comprising one or more phosphorothioate, phosphorodithioate, methylphosphonate, phosphotriester, morpholino, amidate carbamate, carboxymethyl, acetamidate, polyamide, sulfonate, sulfonamide, sulfamate, formacetal, thioformacetal, or alkylsilyl substitutions. For a review of oligonucleotide backbone modifications, see Hunziker and Leumann, Nucleic Acid Analogues: Synthesis and Properties, in Modern Synthetic Methods, VCH, 331-417, 1995; and Mesmaeker et al., ACS, 24-39, 1994.

[0154] In another embodiment, a conjugate molecule can be optionally attached to a dsRNA or analog thereof that decreases expression of a BIRC5 gene by RNAi. For example, such conjugate molecules may be polyethylene glycol, human serum albumin, polyarginine, Gln-Asn polymer, or a ligand for a cellular receptor that can, for example, mediate cellular uptake (e.g., HIV TAT, see Vocero-Akbani et al., Nature Med. 5:23, 1999; see also U.S. Patent Application Publication No. 2004/0132161). Examples of specific conjugate molecules contemplated by the instant disclosure that can be attached to a dsRNA or analog thereof of this disclosure are described in Vargeese et al., U.S. Patent Application Publication No. 2003/0130186, and U.S. Patent Application Publication No. 2004/0110296. In another embodiment, a conjugate molecule is covalently attached to a dsRNA or analog thereof that decreases expression of a BIRC5 gene by RNAi via a biodegradable linker. In certain embodiments, a conjugate molecule can be attached at the 3′-end of either the sense strand, the antisense strand, or both strands of a dsRNA molecule provided herein. In another embodiment, a conjugate molecule can be attached at the 5′-end of either the sense strand, the antisense strand, or both strands of the dsRNA or analog thereof. In yet another embodiment, a conjugate molecule is attached at both the 3′-end and 5′-end of either the sense strand, the antisense strand, or both strands of a dsRNA molecule, or any combination thereof. In further embodiments, a conjugate molecule of this disclosure comprises a molecule that facilitates delivery of a dsRNA or analog thereof into a biological system, such as a cell. A person of skill in the art can screen dsRNA of this disclosure having various conjugates to determine whether the dsRNA-conjugate possesses improved properties (e.g., pharmacokinetic profiles, bioavailability, stability) while maintaining the ability to mediate RNAi in, for example, an animal model as described herein or generally known in the art.

Methods for Selecting dsRNA Molecules Specific for BIRC5

[0155] As indicated herein, the present disclosure also provides methods for selecting dsRNA and analogs thereof that are capable of specifically binding to a BIRC5 gene (including a mRNA splice variant thereof) while being incapable of specifically binding or minimally binding to non-BIRC5 genes. The selection process disclosed herein is useful, for example, in eliminating dsRNAs analogs that are cytotoxic due to non-specific binding to, and subsequent degradation of, one or more non-BIRC5 genes.

[0156] Methods of the present disclosure do not require a priori knowledge of the nucleotide sequence of every possible gene variant (including mRNA splice variants) targeted by the dsRNA or analog thereof. In one embodiment, the nucleotide sequence of the dsRNA is selected from a conserved region or consensus sequence of a BIRC5 gene. In another embodiment, the nucleotide sequence of the dsRNA may be selectively or preferentially targeted to a certain sequence contained in an mRNA splice variant of a BIRC5 gene.

[0157] In certain embodiments, methods are provided for selecting one or more dsRNA molecule that decreases expression of a BIRC5 gene by RNAi, comprising a first strand that is complementary to a BIRC5 mRNA set forth in SEQ ID NO: 1158, 1159 or 1160 and a second strand that is complementary to the first strand, wherein the first and second strands form a double-stranded region of about 15 to about 40 base pairs (see, e.g., BIRC5 sequences in the Sequence Listing identified herein), and wherein at least one uridine of the dsRNA molecule is replaced with a 5-methyluridine or 2-thioribothymidine or 2′-O-methyl-5-methyluridine, which methods employ “off-target” profiling whereby one or more dsRNA provided herein is contacted with a cell, either in vivo or in vitro, and total mRNA is collected for use in probing a microarray comprising oligonucleotides having one or more nucleotide sequence from a panel of known genes, including non-BIRC5 genes (e.g., interferon). Within related embodiments, one or more dsRNA molecule that decreases expression of a BIRC5 gene by RNAi may further comprise a third strand that is complementary to the first strand, wherein the first and third strands form a double-stranded region wherein the double-stranded region formed by the first and third strands is non-overlapping with a double-stranded region formed by the first and second strands. The “off-target” profile of the dsRNA provided herein is quantified by determining the number of non-BIRC5 genes having reduced expression levels in the presence of the candidate dsRNAs. The existence of “off target” binding indicates a dsRNA is capable of specifically binding to one or more non-BIRC5 gene messages. In certain embodiments, a dsRNA as provided herein (see, e.g., sequences in the Sequence Listing identified herein) applicable to therapeutic use will exhibit a greater stability, minimal interferon response, and little or no “off-target” binding.

[0158] Still further embodiments provide methods for selecting more efficacious dsRNA by using one or more reporter gene constructs comprising a constitutive promoter, such as a cytomegalovirus (CMV) or phosphoglycerate kinase (PGK) promoter, operably fused to, and capable of altering the expression of one or more reporter genes, such as a luciferase, chloramphenicol (CAT), or β-galactosidase, which, in turn, is operably fused in-frame with a dsRNA (such as one having a length between about 15 base-pairs and about 40 base-pairs or from about 5 nucleotides to about 24 nucleotides, or about 25 nucleotides to about 40 nucleotides) that contains a BIRC5 sequence, as provided herein.

[0159] Individual reporter gene expression constructs may be co-transfected with one or more dsRNA or analog thereof. The capacity of a given dsRNA to reduce the expression level of BIRC5 may be determined by comparing the measured reporter gene activity in cells transfected with or without a dsRNA molecule of interest.

[0160] Certain embodiments disclosed herein provide methods for selecting one or more modified dsRNA molecule(s) that employ the step of predicting the stability of a dsRNA duplex. In some embodiments, such a prediction is achieved by employing a theoretical melting curve wherein a higher theoretical melting curve indicates an increase in dsRNA duplex stability and a concomitant decrease in cytotoxic effects. Alternatively, stability of a dsRNA duplex may be determined empirically by measuring the hybridization of a single RNA analog strand as described herein to a complementary target gene within, for example, a polynucleotide array. The melting temperature (i.e., the Tₘ value) for each modified RNA and complementary RNA immobilized on the array can be determined and, from this Tₘ value, the relative stability of the modified RNA pairing with a complementary RNA molecule determined.

[0161] For example, Kawase et al. (Nucleic Acids Res. 14:7727, 1986) have described an analysis of the nucleotide-pairing properties of Di (inosine) to A, C, G, and T, which was achieved by measuring the hybridization of oligonucleotides (ODNs) with Di in various positions to complementary sets of ODNs made as an array. The relative strength of nucleotide-pairing is I-C>I-A>I-G≈I-T. Generally, Di containing duplexes showed lower Tₘ values when compared to the corresponding wild type (WT) nucleotide pair. The stabilization of Di by pairing was in order of Dc>Da>Dg>Dt>Du. As a person of skill in the art would understand, although universal-binding nucleotides are used herein as an example of determining duplex stability (i.e., the Tₘ value), other nucleotide substitutions (e.g., 5-methyluridine for uridine) or further modifications (e.g., a ribose modification at the 2′-position) can also be evaluated by these or similar methods.

[0162] In still further embodiments of the presently disclosed methods, one or more anti-codon within an antisense strand of a dsRNA molecule or analog thereof is substituted with a universal-binding nucleotide in a second or third position in the anti-codon of the antisense strand. By substituting a universal-binding nucleotide for a first or second position, the one or more first or second position nucleotide-pair substitution allows the substituted dsRNA molecule to specifically bind to mRNA wherein a first or a second position nucleotide-pair substitution has occurred, wherein the one or more nucleotide-pair substitution results in an amino acid change in the corresponding gene product.

[0163] Any of these methods of identifying dsRNA of interest can also be used to examine a dsRNA that decreases expression of a BIRC5 gene by RNA interference, comprising a first strand that is complementary to a BIRC5 mRNA set forth in SEQ ID NO: 1158, 1159 or 1160and a second and third strand that have non-overlapping complementarity to the first strand, wherein the first and at least one of the second or third strand form a double-stranded region of about 5 to about 13 base pairs; wherein at least one pyrimidine of the dsRNA comprises a pyrimidine nucleoside according to Formula I or II:

[chemical structure]

wherein R¹ and R² are each independently a —H, —OH, —OCH₃, —OCH₂OCH₂CH₃, —OCH₂CH₂OCH₃, halogen, substituted or unsubstituted C₁-C₁₀ alkyl, alkoxy, alkoxyalkyl, hydroxyalkyl, carboxyalkyl, alkylsulfonylamino, aminoalkyl, dialkylamino, alkylaminoalkyl, dialkylaminoalkyl, haloalkyl, trifluoromethyl, cycloalkyl, (cycloalkyl)alkyl, substituted or unsubstituted C₂-C₁₀ alkenyl, substituted or unsubstituted —O-allyl, —O—CH₂CH═CH₂, —O—CH═CHCH₃, substituted or unsubstituted C₂-C₁₀ alkynyl, carbamoyl, carbamyl, carboxy, carbonylamino, substituted or unsubstituted aryl, substituted or unsubstituted aralkyl, —NH₂, —NO₂, —C≡N, or heterocyclo group; R³ and R⁴ are each independently a hydroxyl, a protected hydroxyl, or an internucleoside linking group; and R⁵ and R⁸ are independently O or S. In certain embodiments, at least one nucleoside is according to Formula I in which R¹ is methyl and R² is —OH, or R¹ is methyl, R² is —OH, and R⁸ is S. In certain embodiments, at least one nucleoside is according to Formula I in which R¹ is methyl and R² is —O-methyl, or R¹ is methyl, R² is —O-methyl, and R⁸ is O. In other embodiments, the internucleoside linking group covalently links from about 5 to about 40 nucleosides.

### Compositions and Methods of Use

[0164] As set forth herein, dsRNA of the instant disclosure are designed to target a BIRC5 gene (including one or more mRNA splice variant thereof) that is expressed at an elevated level or continues to be expressed when it should not, and is a causal or contributing factor associated with, for example, atherosclerosis, diabetes mellitus, and cerebrovascular disease, state, or adverse condition. In this context, a dsRNA or analog thereof of this disclosure will effectively downregulate expression of a BIRC5 gene to levels that prevent, alleviate, or reduce the severity or recurrence of one or more associated disease symptoms. Alternatively, for various distinct disease models in which expression of a BIRC5 gene is not necessarily elevated as a consequence or sequel of disease or other adverse condition, down regulation of a BIRC5 gene will nonetheless result in a therapeutic result by lowering gene expression (i.e., to reduce levels of a selected mRNA or protein product of a BIRC5 gene). Furthermore, dsRNAs of this disclosure may be targeted to lower expression of BIRC5, which can result in upregulation of a “downstream” gene whose expression is negatively regulated, directly or indirectly, by a BIRC5 protein. The dsRNA molecules of the instant disclosure comprise useful reagents and can be used in methods for a variety of therapeutic, diagnostic, target validation, genomic discovery, genetic engineering, and pharmacogenomic applications.

[0165] In certain embodiments, aqueous suspensions contain dsRNA of this disclosure in admixture with suitable excipients, such as suspending agents or dispersing or wetting agents. Exemplary suspending agents include sodium carboxymethylcellulose, methylcellulose, hydropropyl-methylcellulose, sodium alginate, polyvinylpyrrolidone, gum tragacanth and gum acacia. Representative dispersing or wetting agents include naturally-occurring phosphatides (e.g., lecithin), condensation products of an alkylene oxide with fatty acids (e.g., polyoxyethylene stearate), condensation products of ethylene oxide with long chain aliphatic alcohols (e.g., heptadecaethyleneoxycetanol), condensation products of ethylene oxide with partial esters derived from fatty acids and hexitol (e.g., polyoxyethylene sorbitol monooleate), or condensation products of ethylene oxide with partial esters derived from fatty acids and hexitol anhydrides (e.g., polyethylene sorbitan monooleate). In certain embodiments, the aqueous suspensions can optionally contain one or more preservatives (e.g., ethyl or n-propyl-p-hydroxybenzoate), one or more coloring agents, one or more flavoring agents, or one or more sweetening agents (e.g., sucrose, saccharin). In additional embodiments, dispersible powders and granules suitable for preparation of an aqueous suspension by the addition of water provide dsRNA of this disclosure in admixture with a dispersing or wetting agent, suspending agent and optionally one or more preservative, coloring agent, flavoring agent, or sweetening agent.

[0166] The present disclosure includes dsRNA compositions prepared for storage or administration that include a pharmaceutically effective amount of a desired compound in a pharmaceutically acceptable carrier or diluent. Acceptable carriers or diluents for therapeutic use are well known in the pharmaceutical art, and are described, for example, in Remington's Pharmaceutical Sciences, Mack Publishing Co., A. R. Gennaro edit., 1985, hereby incorporated by reference herein. In certain embodiments, pharmaceutical compositions of this disclosure can optionally include preservatives, antioxidants, stabilizers, dyes, flavoring agents, or any combination thereof. Exemplary preservatives include sodium benzoate, sorbic acid, chlorobutanol, and esters of p-hydroxybenzoic acid.

[0167] The dsRNA compositions of the instant disclosure can be effectively employed as pharmaceutically-acceptable formulations. Pharmaceutically-acceptable formulations prevent, alter the occurrence or severity of, or treat (alleviate one or more symptom(s) to a detectable or measurable extent) of a disease state or other adverse condition in a subject. A pharmaceutically acceptable formulation includes salts of the above compounds, e.g., acid addition salts, such as salts of hydrochloric acid, hydrobromic acid, acetic acid, or benzene sulfonic acid. A pharmaceutical composition or formulation refers to a composition or formulation in a form suitable for administration into a cell, or a subject such as a human (e.g., systemic administration). The formulations of the present disclosure, having an amount of dsRNA sufficient to treat or prevent a disorder associated with BIRC5 gene expression are, for example, suitable for topical (e.g., creams, ointments, skin patches, eye drops, ear drops) application or administration. Other routes of administration include oral, parenteral, sublingual, bladder wash-out, vaginal, rectal, enteric, suppository, nasal, and inhalation. The term parenteral, as used herein, includes subcutaneous, intravenous, intramuscular, intraarterial, intraabdominal, intraperitoneal, intraarticular, intraocular or retrobulbar, intraaural, intrathecal, intracavitary, intracelial, intraspinal, intrapulmonary or transpulmonary, intrasynovial, and intraurethral injection or infusion techniques. The pharmaceutical compositions of the present disclosure are formulated to allow the dsRNA contained therein to be bioavailable upon administration to a subject.

[0168] In further embodiments, dsRNA of this disclosure can be formulated as oily suspensions or emulsions (e.g., oil-in-water) by suspending dsRNA in, for example, a vegetable oil (e.g., arachis oil, olive oil, sesame oil or coconut oil) or a mineral oil (e.g., liquid paraffin). Suitable emulsifying agents can be naturally-occurring gums (e.g., gum acacia or gum tragacanth), naturally-occurring phosphatides (e.g., soy bean, lecithin, esters or partial esters derived from fatty acids and hexitol), anhydrides (e.g., sorbitan monooleate), or condensation products of partial esters with ethylene oxide (e.g., polyoxyethylene sorbitan monooleate). In certain embodiments, the oily suspensions or emulsions can optionally contain a thickening agent, such as beeswax, hard paraffin or cetyl alcohol. In related embodiments, sweetening agents and flavoring agents can optionally be added to provide palatable oral preparations. In yet other embodiments, these compositions can be preserved by optionally adding an anti-oxidant, such as ascorbic acid.

[0169] In further embodiments, dsRNA of this disclosure can be formulated as syrups and elixirs with sweetening agents (e.g., glycerol, propylene glycol, sorbitol, glucose or sucrose). Such formulations can also contain a demulcent, preservative, flavoring, coloring agent, or any combination thereof. In other embodiments, pharmaceutical compositions comprising dsRNA of this disclosure can be in the form of a sterile, injectable aqueous or oleaginous suspension. The sterile injectable preparation can also be a sterile, injectable solution or suspension in a non-toxic parenterally acceptable diluent or solvent (e.g., as a solution in 1,3-butanediol). Among the exemplary acceptable vehicles and solvents useful in the compositions of this disclosure is water, Ringer's solution, or isotonic sodium chloride solution. In addition, sterile, fixed oils may be employed as a solvent or suspending medium for the dsRNA of this disclosure. For this purpose, any bland fixed oil can be employed including synthetic mono- or diglycerides. In addition, fatty acids such as oleic acid find use in the preparation of parenteral formulations.

[0170] Within certain embodiments of this disclosure, pharmaceutical compositions and methods are provided that feature the presence or administration of one or more dsRNA or analogs thereof of this disclosure, combined, complexed, or conjugated with a polypeptide, optionally formulated with a pharmaceutically-acceptable carrier, such as a diluent, stabilizer, buffer, or the like. The negatively charged dsRNA molecules of this disclosure may be administered to a patient by any standard means, with or without stabilizers, buffers, or the like, to form a composition suitable for treatment. When it is desired to use a liposome delivery mechanism, standard protocols for formation of liposomes can be followed. The compositions of the present disclosure may also be formulated and used as a tablet, capsule or elixir for oral administration, suppository for rectal administration, sterile solution, or suspension for injectable administration, either with or without other compounds known in the art. Thus, dsRNAs of the present disclosure may be administered in any form, such as nasally, transdermally, parenterally, or by local injection.

[0171] In accordance with this disclosure, dsRNA molecules (optionally substituted or modified or conjugated), compositions thereof, and methods for inhibiting expression of a BIRC5 gene in a cell or organism are provided. In certain embodiments, this disclosure provides methods and dsRNA compositions for treating a subject, including a human cell, tissue or individual, having a disease or at risk of developing a disease caused by or associated with the expression of a BIRC5 gene. In one embodiment, the method includes administering a dsRNA of this disclosure or a pharmaceutical composition containing the dsRNA to a cell or an organism, such as a mammal, such that expression of the target gene is silenced. Subjects (e.g., mammalian, human) amendable for treatment using the dsRNA molecules (optionally substituted or modified or conjugated), compositions thereof, and methods of the present disclosure include those suffering from one or more disease or condition mediated, at least in part, by overexpression or inappropriate expression of a BIRC5 gene, or which are amenable to treatment by reducing expression of a BIRC5 protein, including coronary artery disease (i.e., coronary heart disease, ischaemic heart disease), atherosclerosis, diabetes mellitus, dyslipidemia (e.g., hyperlipidemia), peripheral vascular and ischemic cerebrovascular disease, and risk of ischemic stroke (cerebral thrombosis and cerebral embolisms) and hemorrhagic stroke (cerebral hemorrhage and subarachnoid hemorrhage). Within exemplary embodiments, the compositions and methods of this disclosure are also useful as therapeutic tools to regulate expression of BIRC5 to treat or prevent symptoms of, for example, the conditions listed herein.

[0172] In any of the methods disclosed herein there may be used with one or more dsRNA, or substituted or modified dsRNA, as described herein, comprising a first strand that is complementary to a human survivin (BIRC5) mRNA as set forth in SEQ ID NO: 1158, 1159 or 1160, and a second strand and a third strand that is each complementary to non-overlapping regions of the first strand, wherein the second strand and third strands can anneal with the first strand to form at least two double-stranded regions spaced apart by up to 10 nucleotides and thereby forming a gap between the second and third strands, and wherein the mdRNA molecule optionally includes at least one double-stranded region of 5 base pairs to 13 base pairs. In other embodiments, subjects can be effectively treated, prophylactically or therapeutically, by administering an effective amount of one or more dsRNA having a first strand that is complementary to a human survivin (BIRC5) mRNA as set forth in SEQ ID NO: 1158, 1159 or 1160, and a second strand and a third strand that is each complementary to non-overlapping regions of the first strand, wherein the second strand and third strands can anneal with the first strand to form at least two double-stranded regions spaced apart by up to 10 nucleotides and thereby forming a gap between the second and third strands, and wherein the mdRNA molecule optionally includes at least one double-stranded region of 5 base pairs to 13 base pairs and at least one pyrimidine of the mdRNA is substituted with a pyrimidine nucleoside according to Formula I or II:

[chemical structure]

wherein R¹ and R² are each independently a —H, —OH, —OCH₃, —OCH₂OCH₂CH₃, —OCH₂CH₂OCH₃, halogen, substituted or unsubstituted C₁-C₁₀ alkyl, alkoxy, alkoxyalkyl, hydroxyalkyl, carboxyalkyl, alkylsulfonylamino, aminoalkyl, dialkylamino, alkylaminoalkyl, dialkylaminoalkyl, haloalkyl, trifluoromethyl, cycloalkyl, (cycloalkyl)alkyl, substituted or unsubstituted C₂-C₁₀ alkenyl, substituted or unsubstituted —O-allyl, —O—CH₂CH═CH₂, —O—CH═CHCH₃, substituted or unsubstituted C₂-C₁₀ alkynyl, carbamoyl, carbamyl, carboxy, carbonylamino, substituted or unsubstituted aryl, substituted or unsubstituted aralkyl, —NH₂, —NO₂, —CN, or heterocyclo group; R³ and R⁴ are each independently a hydroxyl, a protected hydroxyl, or an internucleoside linking group; and R⁵ and R⁸ are independently O or S. In certain embodiments, at least one nucleoside is according to Formula I in which R¹ is methyl and R² is —OH, or R¹ is methyl, R² is —OH, and R⁸ is S. In other embodiments, the internucleoside linking group covalently links from about 5 to about 40 nucleosides.

[0173] In any of the methods described herein, the dsRNA used may include multiple modifications. For example, a dsRNA can have at least one 5-methyluridine, 2′-O-methyl-5-methyluridine, LNA, 2′-methoxy, 2′-fluoro, 2′-deoxy, phosphorothioate linkage, inverted base terminal cap, or any combination thereof. In certain exemplary methods, a dsRNA will have from one to all 5-methyluridines and have up to about 75% LNA. In other exemplary methods, a dsRNA will have from one to all 5-methyluridines and have up to about 75% 2′-methoxy provided the 2′-methoxy are not at the Argonaute cleavage site. In still other exemplary methods, a dsRNA will have from one to all 5-methyluridines and have up to about 100% 2′-fluoro substitutions. In further exemplary methods, a dsRNA will have from one to all 5-methyluridines and have up to about 75% 2′-deoxy. In further exemplary methods, a dsRNA will have up to about 75% LNA and have up to about 75% 2′-methoxy. In still other embodiments, a dsRNA will have up to about 75% LNA and have up to about 100% 2′-fluoro. In further exemplary methods, a dsRNA will have up to about 75% LNA and have up to about 75% 2′-deoxy. In further exemplary methods, a dsRNA will have up to about 75% 2′-methoxy and have up to about 100% 2′-fluoro. In further exemplary methods, a dsRNA will have up to about 75% 2′-methoxy and have up to about 75% 2′-deoxy. In further embodiments, a dsRNA will have up to about 100% 2′-fluoro and have up to about 75% 2′-deoxy.

[0174] In other exemplary methods for using multiply modified dsRNA, a dsRNA will have from one to all uridines substituted with 5-methyluridine, up to about 75% LNA, and up to about 75% 2′-methoxy. In still further exemplary methods, a dsRNA will have from one to all 5-methyluridines, up to about 75% LNA, and up to about 100% 2′-fluoro. In further exemplary methods, a dsRNA will have from one to all 5-methyluridines, up to about 75% LNA, and up to about 75% 2′-deoxy. In further exemplary methods, a dsRNA will have from one to all 5-methyluridines, up to about 75% 2′-methoxy, and up to about 75% 2′-fluoro. In further exemplary methods, a dsRNA will have from one to all 5-methyluridines, up to about 75% 2′-methoxy, and up to about 75% 2′-deoxy. In more exemplary methods, a dsRNA will have from one to all 5-methyluridines, up to about 100% 2′-fluoro, and up to about 75% 2′-deoxy. In yet other exemplary methods, a dsRNA will have from one to all 5-methyluridines, up to about 75% LNA, up to about 75% 2′-methoxy, up to about 100% 2′-fluoro, and up to about 75% 2′-deoxy. In other exemplary methods, a dsRNA will have up to about 75% LNA, up to about 75% 2′-methoxy, and up to about 100% 2′-fluoro. In further exemplary methods, a dsRNA will have up to about 75% LNA, up to about 75% 2′-methoxy, and up to about 75% 2′-deoxy. In more exemplary methods, a dsRNA will have up to about 75% LNA, up to about 100% 2′-fluoro, and up to about 75% 2′-deoxy. In still further exemplary methods, a dsRNA will have up to about 75% 2′-methoxy, up to about 100% 2′-fluoro, and up to about 75% 2′-deoxy.

[0175] In any of these exemplary methods for using multiply modified dsRNA, the dsRNA may further comprise up to 100% phosphorothioate internucleoside linkages, from one to ten or more inverted base terminal caps, or any combination thereof. Additionally, any of these dsRNA may have these multiple modifications on one strand, two strands, three strands, a plurality of strands, or all strands, or on the same or different nucleoside within a dsRNA molecule. Finally, in any of these multiple modification dsRNA, the dsRNA must have gene silencing activity.

[0176] In further embodiments, subjects can be effectively treated, prophylactically or therapeutically, by administering an effective amount of one or more dsRNA, or substituted or modified dsRNA as described herein, having a first strand that is complementary to a BIRC5 mRNA as set forth in SEQ ID NO: 1158, 1159 or 1160, and a second strand and a third strand that is each complementary to non-overlapping regions of the first strand, wherein the second strand and third strands can anneal with the first strand to form at least two double-stranded regions spaced apart by up to 10 nucleotides and thereby forming a gap between the second and third strands, and wherein the combined double-stranded regions total about 15 base pairs to about 40 base pairs and the mdRNA molecule optinally has blunt ends. In still further embodiments, methods disclosed herein there may be used with one or more dsRNA that comprises a first strand that is complementary to a BIRC5 mRNA as set forth in SEQ ID NO: 1158, 1159 or 1160, and a second strand and a third strand that is each complementary to non-overlapping regions of the first strand, wherein the second strand and third strands can anneal with the first strand to form at least two double-stranded regions spaced apart by up to 10 nucleotides and thereby forming a gap between the second and third strands, and wherein the mdRNA molecule optionally includes at least one double-stranded region of 5 base pairs to 13 base pairs, the mdRNA molecule optinally has blunt ends, and at least one pyrimidine of the mdRNA is substituted with a pyrimidine nucleoside according to Formula I or II:

[chemical structure]

wherein R¹ and R² are each independently a —H, —OH, —OCH₃, —OCH₂OCH₂CH₃, —OCH₂CH₂OCH₃, halogen, substituted or unsubstituted C₁-C₁₀ alkyl, alkoxy, alkoxyalkyl, hydroxyalkyl, carboxyalkyl, alkylsulfonylamino, aminoalkyl, dialkylamino, alkylaminoalkyl, dialkylaminoalkyl, haloalkyl, trifluoromethyl, cycloalkyl, (cycloalkyl)alkyl, substituted or unsubstituted C₂-C₁₀ alkenyl, substituted or unsubstituted —O-allyl, —O—CH₂CH═CH₂, —O—CH═CHCH₃, substituted or unsubstituted C₂-C₁₀ alkynyl, carbamoyl, carbamyl, carboxy, carbonylamino, substituted or unsubstituted aryl, substituted or unsubstituted aralkyl, —NH₂, —NO₂, —CN, or heterocyclo group; R³ and R⁴ are each independently a hydroxyl, a protected hydroxyl, or an internucleoside linking group; and R⁵ and R⁸ are independently O or S. In certain embodiments, at least one nucleoside is according to Formula I in which R¹ is methyl and R² is —OH, or R¹ is methyl, R² is —OH, and R⁸ is S. In certain embodiments, at least one nucleoside is according to Formula I in which R¹ is methyl and R² is —O-methyl, or R¹ is methyl, R² is —O-methyl, and R⁸ is O. In other embodiments, the internucleoside linking group covalently links from about 5 to about 40 nucleosides.

[0177] Within additional aspects of this disclosure, combination formulations and methods are provided comprising an effective amount of one or more dsRNA of the present disclosure in combination with one or more secondary or adjunctive active agents that are formulated together or administered coordinately with the dsRNA of this disclosure to control a BIRC5-associated disease or condition as described herein. Useful adjunctive therapeutic agents in these combinatorial formulations and coordinate treatment methods include, for example, dsRNAs that target and decrease the expression of other genes whose abbarent expression is related to a disease or condition described herein (e.g., bladder cancer and/liver cancer), enzymatic nucleic acid molecules, allosteric nucleic acid molecules, antisense, decoy, or aptamer nucleic acid molecules, antibodies such as monoclonal antibodies, small molecules and other organic or inorganic compounds including metals, salts and ions, and other drugs and active agents indicated for treating a BIRC5-associated disease or condition, including chemotherapeutic agents used to treat cancer, steroids, non-steroidal anti-inflammatory drugs (NSAIDs), tyrosine kinase inhibitors, or the like.

[0178] Exemplary chemotherapeutic agents include alkylating agents (e.g., cisplatin, oxaliplatin, carboplatin, busulfan, nitrosoureas, nitrogen mustards, uramustine, temozolomide), antimetabolites (e.g., aminopterin, methotrexate, mercaptopurine, fluorouracil, cytarabine), taxanes (e.g., paclitaxel, docetaxel), anthracyclines (e.g., doxorubicin, daunorubicin, epirubicin, idaruicin, mitoxantrone, valrubicin), bleomycin, mytomycin, actinomycin, hydroxyurea, topoisomerase inhibitors (e.g., camptothecin, topotecan, irinotecan, etoposide, teniposide), monoclonal antibodies (e.g., alemtuzumab, bevacizumab, cetuximab, gemtuzumab, panitumumab, rituximab, tositumomab, trastuzumab), vinca alkaloids (e.g., vincristine, vinblastine, vindesine, vinorelbine), cyclophosphamide, prednisone, leucovorin, oxaliplatin.

[0179] Some adjunctive therapies may be directed at targets that interact or associate with BIRC5 or affect specific BIRC5 biological activities. Adjunctive therapies include statins (e.g., rosuvastatin, lovastatin, atorvastatin, cerivastatin, fluvastatin, mevastatin, pitavastatin, pravastatin, simvastatin), bile acid-binding resins, stanol and sterol esters from plants, and inhibitors of cholesterol absorption, fibrates (e.g., fenofibrate, bezafibrate, ciprofibrate, clofibrate, gemfibrozil), niacin, fish-oils, ezetimibe, amlodipine, other lipid-altering agents, additional small molecules, rationally designed peptides, and antibodies or fragments thereof.

[0180] Exemplary genes that may be targeted via the RNAi pathway by way of a dsRNA and used in combination with a dsRNA of this disclosure that controls expression of a PLK1 gene include, but are not limited to, epidermal growth factor receptor (EGFR; see PCT/US2008/055360, specifically the claims and sequence listing for guidance with respect to selecting particular dsRNAs that down-regulate the EGFR gene), fms-related tyrosine kinase 1 (vascular endothelial growth factor/vascular permeability factor receptor; FLT1 or VEGFR-1; see PCT/US2008/055370, specifically the claims and sequence listing for guidance with respect to selecting particular dsRNAs that down-regulate the VEGFR-1 gene), vascular endothelial growth factor A (VEGF-A; see PCT/US2008/055383, specifically the claims and sequence listing for guidance with respect to selecting particular dsRNAs that down-regulate the VEGF-A gene), v-akt murine thymoma viral oncogene homolog 1 (AKT1; see PCT/US2008/055339, specifically the claims and sequence listing for guidance with respect to selecting particular dsRNAs that down-regulate the AKT1 gene), breakpoint cluster region (BCR)-abelson murine leukemia viral oncogene homology (ABL) or BCR-ABL (see PCT/US2008/055378, specifically the claims and sequence listing for guidance with respect to selecting particular dsRNAs that down-regulate the BCR-ABL gene), hypoxia-inducible factor 1, alpha subunit (HIF1A; see PCT/US2008/055385, specifically the claims and sequence listing for guidance with respect to selecting particular dsRNAs that down-regulate the HIF1A gene), FK506 binding protein 12-rapamycin associated protein 1 (FRAP1; see PCT/US2008/055365, specifically the claims and sequence listing for guidance with respect to selecting particular dsRNAs that down-regulate the FRAP1 gene), RAF1 (see PCT/US2008/055366, specifically the claims and sequence listing for guidance with respect to selecting particular dsRNAs that down-regulate the RAF1 gene, protein kinase N3 (PKN3; see PCT/US2008/055386, specifically the claims and sequence listing for guidance with respect to selecting particular dsRNAs that down-regulate the PKN3 gene), and platelet-derived growth factor receptor, alpha polypeptide (PDGFRA; see PCT/US2008/055357, specifically the claims and sequence listing for guidance with respect to selecting particular dsRNAs that down-regulate the PDGFRA gene), in which the above cited PCT patent application are incorporated herein by reference.

[0181] To practice the coordinate administration methods of this disclosure, a dsRNA is administered, simultaneously or sequentially, in a coordinated treatment protocol with one or more of the secondary or adjunctive therapeutic agents contemplated herein. The coordinate administration may be done in any order, and there may be a time period while only one or both (or all) active therapeutic agents, individually or collectively, exert their biological activities. A distinguishing aspect of all such coordinate treatment methods is that the dsRNA present in a composition elicits some favorable clinical response, which may or may not be in conjunction with a secondary clinical response provided by the secondary therapeutic agent. For example, the coordinate administration of the dsRNA with a secondary therapeutic agent as contemplated herein can yield an enhanced (synergistic) therapeutic response beyond the therapeutic response elicited by either or both the purified dsRNA or secondary therapeutic agent alone.

[0182] In another embodiment, a dsRNA of this disclosure can include a conjugate member on one or more of the terminal nucleotides of a dsRNA. The conjugate member can be, for example, a lipophile, a terpene, a protein binding agent, a vitamin, a carbohydrate, or a peptide. For example, the conjugate member can be naproxen, nitroindole (or another conjugate that contributes to stacking interactions), folate, ibuprofen, or a C5 pyrimidine linker. In other embodiments, the conjugate member is a glyceride lipid conjugate (e.g., a dialkyl glyceride derivatives), vitamin E conjugates, or thio-cholesterols. Additional conjugate members include peptides that function, when conjugated to a modified dsRNA of this disclosure, to facilitate delivery of the dsRNA into a target cell, or otherwise enhance delivery, stability, or activity of the dsRNA when contacted with a biological sample (e.g., a target cell expressing BIRC5). Exemplary peptide conjugate members for use within these aspects of this disclosure, include peptides PN27, PN28, PN29, PN58, PN61, PN73, PN158, PN159, PN173, PN182, PN183, PN202, PN204, PN250, PN361, PN365, PN404, PN453, PN509, and PN963, described, for example, in U.S. Patent Application Publication Nos. 2006/0040882 and 2006/0014289, and U.S. Provisional Patent Application Nos. 60/822,896 and 60/939,578; and PCT Application PCT/US2007/075744, which are all incorporated herein by reference. In certain embodiments, when peptide conjugate partners are used to enhance delivery of dsRNA of this disclosure, the resulting dsRNA formulations and methods will often exhibit further reduction of an interferon response in target cells as compared to dsRNAs delivered in combination with alternate delivery vehicles, such as lipid delivery vehicles (e.g., Lipofectamine™)

[0183] In still another embodiment, a dsRNA or analog thereof of this disclosure may be conjugated to the polypeptide and admixed with one or more non-cationic lipids or a combination of a non-cationic lipid and a cationic lipid to form a composition that enhances intracellular delivery of the dsRNA as compared to delivery resulting from contacting the target cells with a naked dsRNA. In more detailed aspects of this disclosure, the mixture, complex or conjugate comprising a dsRNA and a polypeptide can be optionally combined with (e.g., admixed or complexed with) a cationic lipid, such as Lipofectine™. To produce these compositions comprised of a polypeptide, dsRNA and a cationic lipid, the dsRNA and peptide may be mixed together first in a suitable medium such as a cell culture medium, after which the cationic lipid is added to the mixture to form a dsRNA/delivery peptide/cationic lipid composition. Optionally, the peptide and cationic lipid can be mixed together first in a suitable medium such as a cell culture medium, followed by the addition of the dsRNA to form the dsRNA/delivery peptide/cationic lipid composition.

[0184] This disclosure also features the use of dsRNA compositions comprising surface-modified liposomes containing, for example, poly(ethylene glycol) lipids (PEG-modified, or long-circulating liposomes or stealth liposomes) (Lasic et al., Chem. Rev. 95:2601, 1995; Ishiwata et al., Chem. Pharm. Bull. 43:1005, 1995; Lasic et al., Science 267:1275, 1995; Oku et al., Biochim. Biophys. Acta 1238:86, 1995; Liu et al., J. Biol. Chem. 42:24864, 1995; PCT Publication Nos. WO 96/10391; WO 96/10390; WO 96/10392).

[0185] In another embodiment, compositions are provided for targeting dsRNA molecules of this disclosure to specific cell types, such as hepatocytes. For example, dsRNA can be complexed or conjugated glycoproteins or synthetic glycoconjugates glycoproteins or synthetic glycoconjugates having branched galactose (e.g., asialoorosomucoid), N-acetyl-D-galactosamine, or mannose (see, e.g., Wu and Wu, J. Biol. Chem. 262:4429, 1987; Baenziger and Fiete, Cell 22: 611, 1980; Connolly et al., J. Biol. Chem. 257:939, 1982; Lee and Lee, Glycoconjugate J. 4:317, 1987; Ponpipom et al., J. Med. Chem. 24:1388, 1981) for a targeted delivery to, for example, the liver.

[0186] A pharmaceutically effective dose is that dose required to prevent, inhibit the occurrence of, or treat (alleviate a symptom to some extent, preferably all of the symptoms) a disease state. The pharmaceutically effective dose depends on the type of disease, the composition used, the route of administration, the type of subject being treated, the physical characteristics of the specific subject under consideration for treatment, concurrent medication, and other factors that those skilled in the medical arts will recognize. For example, an amount between 0.1 mg/kg and 100 mg/kg body weight/day of active ingredients may be administered depending on the potency of a dsRNA of this disclosure.

[0187] A specific dose level for any particular patient depends upon a variety of factors including the activity of the specific compound employed, age, body weight, general health, sex, diet, time of administration, route of administration, rate of excretion, drug combination, and the severity of the particular disease undergoing therapy. Following administration of dsRNA compositions as disclosed herein, test subjects will exhibit about a 10% up to about a 99% reduction in one or more symptoms associated with the disease or disorder being treated, as compared to placebo-treated or other suitable control subjects.

[0188] Dosage levels in the order of about 0.1 mg to about 140 mg per kilogram of body weight per day can be useful in the treatment of the above-indicated conditions (about 0.5 mg to about 7 g per patient per day). The amount of active ingredient that can be combined with the carrier materials to produce a single dosage form varies depending upon the host treated and the particular mode of administration. Dosage unit forms generally contain between from about 1 mg to about 500 mg of an active ingredient.

[0189] A dosage form of a dsRNA or composition thereof of this disclosure can be liquid, an emulsion, or a micelle, or in the form of an aerosol or droplets. A dosage form of a dsRNA or composition thereof of this disclosure can be solid, which can be reconstituted in a liquid prior to administration. The solid can be administered as a powder. The solid can be in the form of a capsule, tablet, or gel. In addition to in vivo gene inhibition, a skilled artisan will appreciate that the dsRNA and analogs thereof of the present disclosure are useful in a wide variety of in vitro applications, such as scientific and commercial research (e.g., elucidation of physiological pathways, drug discovery and development), and medical and veterinary diagnostics.

[0190] Nucleic acid molecules and polypeptides can be administered to cells by a variety of methods known to those of skill in the art, including administration within formulations that comprise a dsRNA alone, a dsRNA and a polypeptide complex/conjugate alone, or that further comprise one or more additional components, such as a pharmaceutically acceptable carrier, diluent, excipient, adjuvant, emulsifier, stabilizer, preservative, or the like. Other exemplary substances used to approximate physiological conditions include pH adjusting and buffering agents, tonicity adjusting agents, and wetting agents, for example, sodium acetate, sodium lactate, sodium chloride, potassium chloride, calcium chloride, sorbitan monolaurate, triethanolamine oleate, and mixtures thereof. For solid compositions, conventional nontoxic pharmaceutically acceptable carriers can be used which include, for example, pharmaceutical grades of mannitol, lactose, starch, magnesium stearate, sodium saccharin, talcum, cellulose, glucose, sucrose, magnesium carbonate, and the like.

[0191] In certain embodiments, the dsRNA and compositions thereof can be encapsulated in liposomes, administered by iontophoresis, or incorporated into other vehicles, such as hydrogels, cyclodextrins, biodegradable nanocapsules, bioadhesive microspheres, or proteinaceous vectors (see, e.g., PCT Publication No. WO 00/53722). In certain embodiments of this disclosure, the dsRNA may be administered in a time release formulation, for example, in a composition that includes a slow release polymer. The dsRNA can be prepared with carriers that will protect against rapid release, for example, a controlled release vehicle such as a polymer, microencapsulated delivery system, or bioadhesive gel. Prolonged delivery of the dsRNA, in various compositions of this disclosure can be brought about by including in the composition agents that delay absorption, for example, aluminum monosterate hydrogels and gelatin.

[0192] Alternatively, a dsRNA composition of this disclosure can be locally delivered by direct injection or by use of, for example, an infusion pump. Direct injection of dsRNAs of this disclosure, whether subcutaneous, intramuscular, or intradermal, can be done by using standard needle and syringe methodologies or by needle-free technologies, such as those described in Conry et al., Clin. Cancer Res. 5:2330, 1999 and PCT Publication No. WO 99/31262.

[0193] The dsRNA of this disclosure and compositions thereof may be administered to subjects by a variety of mucosal administration modes, including oral, rectal, vaginal, intranasal, intrapulmonary, or transdermal delivery, or by topical delivery to the eyes, ears, skin, or other mucosal surfaces. In one embodiment, the mucosal tissue layer includes an epithelial cell layer, which can be pulmonary, tracheal, bronchial, alveolar, nasal, buccal, epidermal, or gastrointestinal. Compositions of this disclosure can be administered using conventional actuators, such as mechanical spray devices, as well as pressurized, electrically activated, or other types of actuators. The dsRNAs can also be administered in the form of suppositories, e.g., for rectal administration. For example, these compositions can be mixed with an excipient that is solid at room temperature but liquid at the rectal temperature so that the dsRNA is released. Such materials include, for example, cocoa butter and polyethylene glycols.

[0194] Further methods for delivery of nucleic acid molecules, such as the dsRNAs of this disclosure, are described, for example, in Boado et al., J. Pharm. Sci. 87:1308, 1998; Tyler et al., FEBS Lett. 421:280, 1999; Pardridge et al., Proc. Nat'l Acad. Sci. USA 92:5592, 1995; Boado, Adv. Drug Delivery Rev. 15:73, 1995; Aldrian-Herrada et al., Nucleic Acids Res. 26:4910, 1998; Tyler et al., Proc. Nat'l Acad. Sci. USA 96:7053-7058, 1999; Akhtar et al., Trends Cell Bio. 2:139, 1992; “Delivery Strategies for Antisense Oligonucleotide Therapeutics,” ed. Akhtar, 1995, Maurer et al., Mol. Membr. Biol. 16:129, 1999; Hofland and Huang, Handb. Exp. Pharmacol 137:165, 1999; and Lee et al., ACS Symp. Ser. 752:184, 2000; PCT Publication No. WO 94/02595.

[0195] All U.S. patents, U.S. patent application publications, U.S. patent applications, foreign patents, foreign patent applications, non-patent publications, figures, tables, and websites referred to in this specification are expressly incorporated herein by reference, in their entirety.

### EXAMPLES

### Example 1

### Knockdown of Gene Expression by mdRNA

[0196] The gene silencing activity of dsRNA as compared to nicked or gapped versions of the same dsRNA was examined using a dual fluorescence assay. A total of 22 different genes were targeted at ten different sites each (see Table 1).

[0197] A Dicer substrate dsRNA molecule was used, which has a 25 nucleotide sense strand, a 27 nucleotide antisense strand, and a two deoxynucleotide overhang at the 3′-end of the antisense strand (referred to as a 25/27 dsRNA). The nicked version of each dsRNA Dicer substrate has a nick at one of positions 9 to 16 on the sense strand as measured from the 5′-end of the sense strand. For example, an ndsRNA having a nick at position 11 has three strands—a 5′-sense strand of 11 nucleotides, a 3′-sense strand of 14 nucleotides, and an antisense strand of 27 nucleotides (which is also referred to as an N11-14/27 mdRNA). In addition, each of the sense strands of the ndsRNA have three locked nucleic acids (LNAs) evenly distributed along each sense fragment. If the nick is at position 9, then the LNAs can be found at positions 2, 6, and 9 of the 5′ sense strand fragment and at positions 11, 18, and 23 of the 3′ sense strand fragment. If the nick is at position 10, then the LNAs can be found at positions 2, 6, and 10 of the 5′ sense strand fragment and at positions 12, 18, and 23 of the 3′ sense strand fragment. If the nick is at position 11, then the LNAs can be found at positions 2, 6, and 11 of the 5′ sense strand fragment and at positions 13, 18, and 23 of the 3′ sense strand fragment. If the nick is at position 12, then the LNAs can be found at positions 2, 6, and 12 of the 5′ sense strand fragment and at positions 14, 18, and 23 of the 3′ sense strand fragment. If the nick is at position 13, then the LNAs can be found at positions 2, 7, and 13 of the 5′ sense strand fragment and at positions 15, 18, and 23 of the 3′ sense strand fragment. If the nick is at position 14, then the LNAs can be found at positions 2, 7, and 14 of the 5′ sense strand fragment and at positions 16, 18, and 23 of the 3′ sense strand fragment. If the nick is at position 15, then the LNAs can be found at positions 2, 8, and 15 of the 5′ sense strand fragment and at positions 17, 19, and 23 of the 3′ sense strand fragment. If the nick is at position 16, then the LNAs can be found at positions 2, 8, and 16 of the 5′ sense strand fragment and at positions 18, 19, and 23 of the 3′ sense strand fragment. Similarly, a gapped version of each dsRNA Dicer substrate has a single nucleotide missing at one of positions 10 to 17 on the sense strand as measured from the 5′-end of the sense strand. For example, a gdsRNA having a gap at position 11 has three strands—a 5′-sense strand of 11 nucleotides, a 3′-sense strand of 13 nucleotides, and an antisense strand of 27 nucleotides (which is also referred to as G11-(1)-13/27 mdRNA). In addition, each of the sense strands of the gdsRNA contain three locked nucleic acids (LNAs) evenly distributed along each sense fragment (as described for the nicked counterparts).

[0198] In sum, three dsRNA were tested at each of the ten different sites per gene—an unmodified dsRNA, a nicked mdRNA with three LNAs per sense strand fragment, and a single nucleotide gapped mdRNA with three LNAs per sense strand fragment. In other words, 660 different dsRNA were examined.

[0199] Briefly, multiwell plates were seeded with about 7-8×10⁵ HeLa cells/well in DMEM having 10% fetal bovine serum, and incubated overnight at 37° C./5% CO₂. The HeLa cell medium was changed to serum-free DMEM just prior to transfection. The psiCHECK™-2 vector, containing about a 1,000 basepair insert of a target gene, diluted in serum-free DMEM was mixed with diluted GenJet™ transfection reagent (SignalDT Biosystems, Hayward, Calif.) according to the manufacturer's instructions and then incubated at room temperature for 10 minutes. The GenJet/psiCHECK™-2-BIRC5 solution was added to the HeLa cells and then incubated at 37° C., 5% CO₂ for 4.5 hours. After the vector transfection, cells were trypsinized and suspended in antibiotic-free DMEM containing 10% FBS at a concentration of 10⁵ cells per mL.

[0200] To transfect the dsRNA, the dsRNA was formulated in OPTI-MEM I reduced serum medium (Gibco® Invitrogen, Carlsbad, Calif.) and placed in multiwell plates. Then Lipofectamine™ RNAiMAX (Invitrogen) was mixed with OPTI-MEM per manufacture's specifications, added to each well containing dsRNA, mixed manually, and incubated at room temperature for 10-20 minutes. Then 30 μL of vector-transfected HeLa cells at 10⁵ cells per mL were added to each well (final dsRNA concentration of 25 nM), the plates were spun for 30 seconds at 1,000 rpm, and then incubated at 37° C./5% CO₂ for 2 days. The Cell Titer Blue (CTB) reagent (Promega, Madison, Wis.) was used to assay for cell viability and proliferation—none of the dsRNA showed any substantial toxicity.

[0201] After transfecting, the media and CTB reagent were removed and the wells washed once with 100 PBS. Cells were assayed for firefly and Renilla luciferase reporter activity by first adding Dual-Glo™ Luciferase Reagent (Promega, Madison, Wis.) for 10 minutes with shaking, and then quantitating the luminescent signal on a VICTOR³™ 1420 Multilabel Counter (PerkinElmer). After measuring the firefly luminescence, Stop & Glo® Reagent (Promega, Madison, Wis.) was added for 10 minutes with shaking to simultaneously quench the firefly reaction and initiate the Renilla luciferase reaction, which was then quantitated on a VICTOR³™ 1420 Multilabel Counter (PerkinElmer). The results are presented in Table 1.

TABLE 1
Gene Silencing Activity* of dsRNA Dicer Substrate and mdRNA (nicked or gapped) Dicer Substrate

| | | | Dicer | Dicer | Dicer | Nicked | Nicked | Nicked | Gapped | Gapped | Gapped | |
|---|---|---|---|---|---|---|---|---|---|---|---|---|
| | | | SEQ ID | Mean | 95% | SEQ ID | Mean | 95% | SEQ ID | Mean | 95% | Length |
| Set | Target | Pos† | NOS‡ | (%) | CI | NOS | (%) | CI | NOS | (%) | CI | 5′-\hat{ } |
| 1 | AKT1 | 1862 | 63, 283 | 20.6 | 4.0% | 503, 723, 283 | 23.5 | 5.7% | 503, 940, 283 | 54.3 | 12.0% | 14 |
| 2 | AKT1 | 1883 | 64, 284 | 29.7 | 7.3% | 504, 724, 284 | 51.4 | 6.7% | 504, 941, 284 | 76.9 | 19.5% | 12 |
| 3 | AKT1 | 2178 | 65, 285 | 15.4 | 2.4% | 505, 725, 285 | 22.3 | 6.4% | 505, 942, 285 | 24.4 | 5.1% | 14 |
| 4 | AKT1 | 2199 | 66, 286 | 26.4 | 3.6% | 506, 726, 286 | 62.7 | 6.6% | 506, 943, 286 | 66.8 | 10.8% | 15 |
| 5 | AKT1 | 2264 | 67, 287 | 35.2 | 7.3% | 507, 727, 287 | 34.1 | 7.3% | 507, 944, 287 | 31.3 | 5.2% | 12 |
| 6 | AKT1 | 2580 | 68, 288 | 27.6 | 5.7% | 508, 728, 288 | 40.1 | 8.3% | 508, 945, 288 | 91.5 | 17.0% | 12 |
| 7 | AKT1 | 2606 | 69, 289 | 14.0 | 2.6% | 509, 729, 289 | 14.9 | 3.2% | 509, 946, 289 | 33.4 | 6.9% | 11 |
| 8 | AKT1 | 2629 | 70, 290 | 21.0 | 10.1% | 510, 730, 290 | 13.5 | 2.4% | 510, 947, 290 | 13.6 | 2.1% | 12 |
| 9 | AKT1 | 2661 | 71, 291 | 37.4 | 6.6% | 511, 731, 291 | 41.0 | 12.1% | 511, 948, 291 | 71.6 | 11.9% | 15 |
| 10 | AKT1 | 2663 | 72, 292 | 18.1 | 4.3% | 512, 732, 292 | 23.0 | 5.9% | 512, 949, 292 | 51.4 | 9.2% | 14 |
| 11 | BCR-ABL (b2a2) | 66 | 73, 293 | 16.9 | 5.9% | 513, 733, 293 | 30.4 | 10.5% | 513, 950, 293 | 38.2 | 11.7% | 13 |
| 12 | BCR-ABL (b2a2) | 190 | 74, 294 | 40.0 | 11.6% | 514, 734, 294 | 22.0 | 6.4% | 514, 951, 294 | 34.6 | 12.0% | 14 |
| 13 | BCR-ABL (b2a2) | 282 | 75, 295 | 24.2 | 5.2% | 515, 735, 295 | 37.6 | 8.2% | 515, 952, 295 | 34.6 | 8.6% | 13 |
| 14 | BCR-ABL (b2a2) | 284 | 76, 296 | 50.9 | 6.9% | 516, 736, 296 | 38.3 | 7.8% | 516, 953, 296 | 68.3 | 18.0% | 13 |
| 15 | BCR-ABL (b2a2) | 287 | 77, 297 | 45.5 | 13.2% | 517, 737, 297 | 39.6 | 11.5% | 517, 954, 297 | 75.2 | 17.2% | 14 |
| 16 | BCR-ABL (b2a2) | 289 | 78, 298 | 36.9 | 7.7% | 518, 738, 298 | 40.0 | 8.9% | 518, 955, 298 | 60.9 | 12.3% | 14 |
| 17 | BCR-ABL (b2a2) | 293 | 79, 299 | 55.9 | 9.8% | 519, 739, 299 | 58.6 | 14.7% | 519, 956, 299 | 87.0 | 14.3% | 13 |
| 18 | BCR-ABL (b2a2) | 461 | 80, 300 | 38.4 | 9.4% | 520, 740, 300 | 35.9 | 12.1% | 520, 957, 300 | 28.6 | 10.2% | 13 |
| 19 | BCR-ABL (b2a2) | 462 | 81, 301 | 31.1 | 13.7% | 521, 741, 301 | 26.5 | 5.5% | 521, 958, 301 | 35.8 | 10.7% | 14 |
| 20 | BCR-ABL (b2a2) | 561 | 82, 302 | 17.7 | 3.4% | 522, 742, 302 | 20.7 | 3.4% | 522, 959, 302 | 35.5 | 10.6% | 12 |
| 21 | BCR-ABL (b3a2) | 352 | 83, 303 | 45.4 | 7.0% | 523, 743, 303 | 39.8 | 8.3% | 523, 960, 303 | 45.5 | 11.0% | 12 |
| 22 | BCR-ABL (b3a2) | 353 | 84, 304 | 22.6 | 1.8% | 524, 744, 304 | 20.5 | 5.1% | 524, 961, 304 | 66.1 | 17.8% | 12 |
| 23 | BCR-ABL (b3a2) | 356 | 85, 305 | 11.9 | 2.5% | 525, 745, 305 | 28.4 | 5.8% | 525, 962, 305 | 56.0 | 10.6% | 13 |
| 24 | BCR-ABL (b3a2) | 357 | 86, 306 | 24.5 | 6.0% | 526, 746, 306 | 25.6 | 7.5% | 526, 963, 306 | 39.2 | 10.0% | 13 |
| 25 | BCR-ABL (b3a2) | 359 | 87, 307 | 56.8 | 9.3% | 527, 747, 307 | 42.4 | 7.3% | 527, 964, 307 | 46.4 | 9.5% | 13 |
| 26 | BCR-ABL (b3a2) | 360 | 88, 308 | 32.3 | 5.0% | 528, 748, 308 | 37.2 | 7.3% | 528, 965, 308 | 55.3 | 13.8% | 13 |
| 27 | BCR-ABL (b3a2) | 362 | 89, 309 | 12.4 | 3.2% | 529, 737, 309 | 26.3 | 9.8% | 529, 954, 309 | 46.2 | 8.3% | 14 |
| 28 | BCR-ABL (b3a2) | 410 | 90, 310 | 66.2 | 12.2% | 530, 749, 310 | 55.9 | 11.2% | 530, 966, 310 | 58.4 | 16.4% | 12 |
| 29 | BCR-ABL (b3a2) | 629 | 91, 311 | 35.0 | 11.7% | 531, 750, 311 | 46.5 | 10.1% | 531, 967, 311 | 41.0 | 9.0% | 13 |
| 30 | BCR-ABL (b3a2) | 727 | 92, 312 | 83.4 | 13.6% | 532, 751, 312 | 76.7 | 22.5% | 532, 968, 312 | 62.9 | 10.9% | 12 |
| 31 | EGFR | 4715 | 93, 313 | 15.3 | 2.2% | 533, 752, 313 | 9.4 | 0.9% | 533, 969, 313 | 11.3 | 1.7% | 11 |
| 32 | EGFR | 4759 | 94, 314 | 3.8 | 0.4% | 534, 753, 314 | 6.3 | 0.8% | 534, 970, 314 | 8.4 | 1.1% | 12 |
| 33 | EGFR | 4810 | 95, 315 | 5.2 | 0.6% | 535, 754, 315 | 5.8 | 0.7% | 535, 971, 315 | 7.2 | 1.0% | 13 |
| 34 | EGFR | 5249 | 96, 316 | 2.6 | 0.4% | 536, 755, 316 | 16.6 | 1.8% | 536, 972, 316 | 42.9 | 3.5% | 14 |
| 35 | EGFR | 5279 | 97, 317 | 7.6 | 1.0% | 537, 756, 317 | 10.6 | 1.1% | 537, 973, 317 | 11.8 | 1.7% | 13 |
| 36 | EGFR | 5374 | 98, 318 | 9.6 | 1.0% | 538, 757, 318 | 8.7 | 0.9% | 538, 974, 318 | 34.7 | 4.3% | 12 |
| 37 | EGFR | 5442 | 99, 319 | 4.1 | 0.8% | 539, 758, 319 | 15.1 | 1.8% | 539, 975, 319 | 19.7 | 2.4% | 12 |
| 38 | EGFR | 5451 | 100, 320 | 5.1 | 0.3% | 540, 759, 320 | 11.5 | 1.3% | 540, 976, 320 | 16.5 | 3.0% | 13 |
| 39 | EGFR | 5469 | 101, 321 | 5.6 | 0.8% | 541, 760, 321 | 5.1 | 0.5% | 541, 977, 321 | 12.2 | 2.5% | 13 |
| 40 | EGFR | 5483 | 102, 322 | 2.2 | 0.4% | 542, 761, 322 | 2.4 | 0.5% | 542, 978, 322 | 6.1 | 0.7% | 9 |
| 41 | FLT1 | 863 | 103, 323 | 7.6 | 1.1% | 543, 762, 323 | 10.2 | 3.3% | 543, 979, 323 | 29.2 | 8.1% | 12 |
| 42 | FLT1 | 906 | 104, 324 | 10.0 | 2.4% | 544, 763, 324 | 10.8 | 0.8% | 544, 980, 324 | 12.4 | 2.1% | 12 |
| 43 | FLT1 | 993 | 105, 325 | 12.2 | 2.5% | 545, 764, 325 | 13.7 | 2.8% | 545, 981, 325 | 20.0 | 11.3% | 13 |
| 44 | FLT1 | 1283 | 106, 326 | 19.6 | 4.5% | 546, 765, 326 | 25.8 | 7.3% | 546, 982, 326 | 18.7 | 6.5% | 12 |
| 45 | FLT1 | 1289 | 107, 327 | 15.5 | 2.0% | 547, 766, 327 | 13.5 | 1.6% | 547, 983, 327 | 22.5 | 5.0% | 12 |
| 46 | FLT1 | 1349 | 108, 328 | 36.8 | 4.2% | 548, 767, 328 | 22.9 | 4.0% | 548, 984, 328 | 52.7 | 5.4% | 14 |
| 47 | FLT1 | 1354 | 109, 329 | 36.6 | 4.0% | 549, 768, 329 | 49.7 | 5.9% | 549, 985, 329 | 45.8 | 9.3% | 14 |
| 48 | FLT1 | 1448 | 110, 330 | 9.3 | 2.5% | 550, 769, 330 | 16.1 | 2.9% | 550, 986, 330 | 24.2 | 3.6% | 13 |
| 49 | FLT1 | 1459 | 111, 331 | 13.7 | 3.6% | 551, 770, 331 | 20.0 | 8.7% | 551, 987, 331 | 22.4 | 4.4% | 12 |
| 50 | FLT1 | 1700 | 112, 332 | 7.9 | 2.2% | 552, 771, 332 | 11.2 | 3.7% | 552, 988, 332 | 36.4 | 8.0% | 13 |
| 51 | FRAP1 | 7631 | 113, 333 | 9.5 | 2.7% | 553, 772, 333 | 23.3 | 4.9% | 553, 989, 333 | 61.8 | 18.3% | 13 |
| 52 | FRAP1 | 7784 | 114, 334 | 15.1 | 1.7% | 554, 773, 334 | 19.9 | 2.8% | 554, 990, 334 | 29.3 | 3.4% | 12 |
| 53 | FRAP1 | 7812 | 115, 335 | 11.9 | 2.9% | 555, 774, 335 | 14.4 | 3.2% | 555, 991, 335 | 28.3 | 12.7% | 11 |
| 54 | FRAP1 | 7853 | 116, 336 | 16.8 | 3.3% | 556, 775, 336 | 24.1 | 3.7% | 556, 992, 336 | 67.5 | 9.2% | 11 |
| 55 | FRAP1 | 8018 | 117, 337 | 41.1 | 9.1% | 557, 776, 337 | 19.8 | 3.3% | 557, 993, 337 | 41.8 | 9.6% | 12 |
| 56 | FRAP1 | 8102 | 118, 338 | 35.7 | 5.1% | 558, 777, 338 | 30.2 | 6.3% | 558, 994, 338 | 39.5 | 9.9% | 12 |
| 57 | FRAP1 | 8177 | 119, 339 | 21.2 | 3.9% | 559, 778, 339 | 33.2 | 9.3% | 559, 995, 339 | 47.3 | 12.3% | 14 |
| 58 | FRAP1 | 8348 | 120, 340 | 25.8 | 3.6% | 560, 779, 340 | 26.8 | 4.4% | 560, 996, 340 | 37.4 | 4.7% | 11 |
| 59 | FRAP1 | 8435 | 121, 341 | 41.1 | 6.7% | 561, 780, 341 | 54.1 | 9.5% | 561, 997, 341 | 74.9 | 8.5% | 12 |
| 60 | FRAP1 | 8542 | 122, 342 | 23.1 | 4.8% | 562, 781, 342 | 16.5 | 5.5% | 562, 998, 342 | 33.6 | 6.4% | 10 |
| 61 | HIF1A | 1780 | 123, 343 | 76.6 | 14.9% | 563, 782, 343 | 89.2 | 11.9% | 563, 999, 343 | 86.3 | 9.3% | 12 |
| 62 | HIF1A | 1831 | 124, 344 | 9.0 | 0.6% | 564, 783, 344 | 14.0 | 2.3% | 564, 1000, 344 | 38.2 | 8.5% | 12 |
| 63 | HIF1A | 1870 | 125, 345 | 21.4 | 4.5% | 565, 784, 345 | 21.2 | 3.3% | 565, 1001, 345 | 19.6 | 2.2% | 13 |
| 64 | HIF1A | 1941 | 126, 346 | 8.9 | 2.1% | 566, 785, 346 | 11.4 | 2.2% | 566, 1002, 346 | 11.7 | 2.5% | 12 |
| 65 | HIF1A | 2068 | 127, 347 | 7.8 | 1.5% | 567, 786, 347 | 7.0 | 1.4% | 567, 1003, 347 | 16.9 | 3.9% | 12 |
| 66 | HIF1A | 2133 | 128, 348 | 13.0 | 2.0% | 568, 787, 348 | 16.7 | 3.1% | 568, 1004, 348 | 16.3 | 3.1% | 10 |
| 67 | HIF1A | 2232 | 129, 349 | 8.6 | 2.0% | 569, 788, 349 | 17.4 | 3.6% | 569, 1005, 349 | 37.8 | 9.6% | 13 |
| 68 | HIF1A | 2273 | 130, 350 | 19.1 | 5.3% | 570, 789, 350 | 23.4 | 4.4% | 570, 1006, 350 | 20.3 | 3.4% | 12 |
| 69 | HIF1A | 2437 | 131, 351 | 8.2 | 1.4% | 571, 790, 351 | 47.7 | 11.5% | 571, 1007, 351 | 72.4 | 14.3% | 13 |
| 70 | HIF1A | 2607 | 132, 352 | 8.0 | 2.1% | 572, 791, 352 | 11.0 | 1.2% | 572, 1008, 352 | 33.6 | 6.0% | 13 |
| 71 | IL17A | 923 | 133, 353 | 5.0 | 0.6% | 573, 792, 353 | 7.3 | 0.7% | 573, 1009, 353 | 26.3 | 2.5% | 12 |
| 72 | IL17A | 962 | 134, 354 | 6.7 | 0.8% | 574, 793, 354 | 7.7 | 0.9% | 574, 1010, 354 | 8.9 | 2.0% | 13 |
| 73 | IL17A | 969 | 135, 355 | 8.9 | 1.7% | 575, 794, 355 | 17.1 | 1.6% | 575, 1011, 355 | 49.5 | 4.3% | 14 |
| 74 | IL17A | 1160 | 136, 356 | 7.2 | 1.3% | 576, 795, 356 | 10.0 | 2.4% | 576, 1012, 356 | 15.4 | 2.8% | 12 |
| 75 | IL17A | 1201 | 137, 357 | 14.1 | 2.2% | 577, 796, 357 | 13.4 | 1.1% | 577, 1013, 357 | 17.2 | 2.8% | 12 |
| 76 | IL17A | 1433 | 138, 358 | 107.1 | 9.7% | 578, 797, 358 | 111.5 | 10.4% | 578, 1014, 358 | 108.1 | 8.8% | 13 |
| 77 | IL17A | 1455 | 139, 359 | 115.4 | 11.1% | 579, 798, 359 | 120.8 | 8.7% | 579, 1015, 359 | 120.3 | 9.9% | 12 |
| 78 | IL17A | 1478 | 140, 360 | 82.7 | 6.3% | 580, 799, 360 | 87.6 | 5.0% | 580, 1016, 360 | 95.9 | 5.6% | 14 |
| 79 | IL17A | 1663 | 141, 361 | 140.2 | 7.8% | 581, 800, 361 | 125.9 | 9.8% | 581, 1017, 361 | 114.7 | 10.1% | 14 |
| 80 | IL17A | 1764 | 142, 362 | 114.3 | 9.2% | 582, 801, 362 | 109.4 | 2.9% | 582, 1018, 362 | 105.7 | 8.1% | 15 |
| 81 | IL18 | 210 | 143, 363 | 13.8 | 2.8% | 583, 802, 363 | 23.9 | 5.8% | 583, 1019, 363 | 21.4 | 5.7% | 14 |
| 82 | IL18 | 368 | 144, 364 | 22.5 | 1.8% | 584, 803, 364 | 21.0 | 2.0% | 584, 1020, 364 | 29.7 | 3.7% | 13 |
| 83 | IL18 | 479 | 145, 365 | 88.1 | 12.9% | 585, 804, 365 | 66.3 | 9.8% | 585, 1021, 365 | 80.0 | 16.8% | 14 |
| 84 | IL18 | 508 | 146, 366 | 8.0 | 1.9% | 586, 805, 366 | 15.7 | 3.5% | 586, 1022, 366 | 17.0 | 5.7% | 12 |
| 85 | IL18 | 521 | 147, 367 | 9.9 | 2.1% | 587, 806, 367 | 10.8 | 2.1% | 587, 1023, 367 | 18.4 | 3.3% | 11 |
| 86 | IL18 | 573 | 148, 368 | 18.6 | 4.7% | 588, 807, 368 | 24.8 | 7.6% | 588, 1024, 368 | 48.8 | 7.7% | 14 |
| 87 | IL18 | 605 | 149, 369 | 27.5 | 6.1% | 589, 808, 369 | 21.3 | 3.9% | 589, 1025, 369 | 14.9 | 2.7% | 13 |
| 88 | IL18 | 663 | 150, 370 | 5.3 | 1.0% | 590, 809, 370 | 8.2 | 1.5% | 590, 1026, 370 | 11.7 | 3.4% | 12 |
| 89 | IL18 | 785 | 151, 371 | 8.6 | 1.0% | 591, 810, 371 | 11.7 | 2.8% | 591, 1027, 371 | 21.1 | 9.1% | 12 |
| 90 | IL18 | 918 | 152, 372 | 13.9 | 1.6% | 592, 811, 372 | 15.0 | 3.0% | 592, 1028, 372 | 30.4 | 3.6% | 11 |
| 91 | IL6 | 24 | 153, 373 | 22.6 | 1.7% | 593, 812, 373 | 45.7 | 7.8% | 593, 1029, 373 | 47.8 | 15.5% | 13 |
| 92 | IL6 | 74 | 154, 374 | 52.5 | 12.6% | 594, 813, 374 | 56.4 | 7.1% | 594, 1030, 374 | 88.3 | 4.5% | 12 |
| 93 | IL6 | 160 | 155, 375 | 49.8 | 7.8% | 595, 814, 375 | 50.6 | 6.1% | 595, 1031, 375 | 68.3 | 9.4% | 14 |
| 94 | IL6 | 370 | 156, 376 | 44.7 | 8.2% | 596, 815, 376 | 52.5 | 4.2% | 596, 1032, 376 | 74.3 | 9.3% | 13 |
| 95 | IL6 | 451 | 157, 377 | 39.3 | 5.0% | 597, 816, 377 | 35.6 | 4.1% | 597, 1033, 377 | 66.6 | 7.1% | 13 |
| 96 | IL6 | 481 | 158, 378 | 68.3 | 8.1% | 598, 817, 378 | 78.7 | 15.6% | 598, 1034, 378 | 63.2 | 6.2% | 11 |
| 97 | IL6 | 710 | 159, 379 | 29.2 | 4.2% | 599, 818, 379 | 32.0 | 4.1% | 599, 1035, 379 | 77.3 | 11.4% | 12 |
| 98 | IL6 | 822 | 160, 380 | 73.7 | 11.0% | 600, 819, 380 | 72.2 | 11.6% | 600, 1036, 380 | 85.2 | 13.3% | 12 |
| 99 | IL6 | 836 | 161, 381 | 98.8 | 21.8% | 601, 820, 381 | 95.0 | 13.2% | 601, 1037, 381 | 90.5 | 15.6% | 13 |
| 100 | IL6 | 960 | 162, 382 | 31.1 | 4.4% | 602, 821, 382 | 20.5 | 6.1% | 602, 1038, 382 | 25.6 | 2.4% | 12 |
| 101 | MAP2K1 | 1237 | 163, 383 | 21.0 | 3.3% | 603, 822, 383 | 27.9 | 3.8% | 603, 1039, 383 | 50.0 | 8.8% | 11 |
| 102 | MAP2K1 | 1342 | 164, 384 | 3.9 | 0.5% | 604, 823, 384 | 8.7 | 1.5% | 604, 1040, 384 | 11.4 | 1.3% | 13 |
| 103 | MAP2K1 | 1501 | 165, 385 | 12.9 | 1.9% | 605, 824, 385 | 19.4 | 2.9% | 605, 1041, 385 | 19.7 | 5.3% | 12 |
| 104 | MAP2K1 | 1542 | 166, 386 | 7.2 | 1.3% | 606, 825, 386 | 11.7 | 2.1% | 606, 1042, 386 | 18.7 | 3.2% | 11 |
| 105 | MAP2K1 | 1544 | 167, 387 | 13.1 | 2.1% | 607, 826, 387 | 11.1 | 1.1% | 607, 1043, 387 | 16.5 | 3.0% | 10 |
| 106 | MAP2K1 | 1728 | 168, 388 | 11.9 | 1.7% | 608, 827, 388 | 11.9 | 1.0% | 608, 1044, 388 | 27.9 | 4.3% | 13 |
| 107 | MAP2K1 | 1777 | 169, 389 | 18.3 | 2.8% | 609, 828, 389 | 37.2 | 4.3% | 609, 1045, 389 | 64.5 | 8.5% | 13 |
| 108 | MAP2K1 | 1892 | 170, 390 | 34.5 | 4.7% | 610, 829, 390 | 37.6 | 6.8% | 610, 1046, 390 | 42.4 | 7.3% | 12 |
| 109 | MAP2K1 | 1954 | 171, 391 | 4.6 | 0.5% | 611, 830, 391 | 4.2 | 0.5% | 611, 1047, 391 | 6.5 | 1.1% | 13 |
| 110 | MAP2K1 | 2062 | 172, 392 | 10.2 | 0.8% | 612, 831, 392 | 10.4 | 2.9% | 612, 1048, 392 | 12.2 | 2.0% | 12 |
| 111 | MAPK1 | 3683 | 173, 393 | 7.0 | 0.9% | 613, 614, 393 | 24.4 | 17.3% | 613, 1049, 393 | 25.2 | 2.6% | 12 |
| 112 | MAPK1 | 3695 | 174, 394 | 32.9 | 4.6% | 614, 832, 394 | 30.9 | 4.0% | 614, 1050, 394 | 33.8 | 3.1% | 13 |
| 113 | MAPK1 | 3797 | 175, 395 | 7.4 | 1.1% | 615, 833, 395 | 6.4 | 1.3% | 615, 1051, 395 | 40.4 | 5.8% | 11 |
| 114 | MAPK1 | 3905 | 176, 396 | 8.0 | 1.0% | 616, 834, 396 | 8.1 | 0.5% | 616, 1052, 396 | 14.8 | 1.4% | 12 |
| 115 | MAPK1 | 3916 | 177, 397 | 11.0 | 1.7% | 617, 835, 397 | 16.0 | 3.3% | 617, 1053, 397 | 45.5 | 8.1% | 10 |
| 116 | MAPK1 | 3943 | 178, 398 | 6.8 | 0.8% | 618, 836, 398 | 6.6 | 0.7% | 618, 1054, 398 | 11.0 | 2.3% | 10 |
| 117 | MAPK1 | 4121 | 179, 399 | 7.6 | 1.1% | 619, 837, 399 | 12.7 | 1.6% | 619, 1055, 399 | 25.1 | 3.1% | 12 |
| 118 | MAPK1 | 4256 | 180, 400 | 27.6 | 2.5% | 620, 838, 400 | 36.8 | 4.0% | 620, 1056, 400 | 57.7 | 7.0% | 13 |
| 119 | MAPK1 | 4294 | 181, 401 | 31.0 | 3.0% | 621, 839, 401 | 22.3 | 3.6% | 621, 1057, 401 | 50.9 | 4.6% | 12 |
| 120 | MAPK1 | 4375 | 182, 402 | 10.9 | 1.1% | 622, 840, 402 | 12.4 | 1.4% | 622, 1058, 402 | 16.9 | 2.7% | 11 |
| 121 | MAPK14 | 2715 | 183, 403 | 11.4 | 2.8% | 623, 841, 403 | 16.5 | 4.1% | 623, 1059, 403 | 16.6 | 2.4% | 12 |
| 122 | MAPK14 | 2737 | 184, 404 | 7.5 | 0.8% | 624, 842, 404 | 10.3 | 1.1% | 624, 1060, 404 | 13.1 | 1.2% | 11 |
| 123 | MAPK14 | 2750 | 185, 405 | 8.7 | 1.0% | 625, 843, 405 | 12.2 | 1.8% | 625, 1061, 405 | 15.8 | 1.9% | 13 |
| 124 | MAPK14 | 2817 | 186, 406 | 6.4 | 0.8% | 626, 844, 406 | 14.6 | 1.7% | 626, 1062, 406 | 19.4 | 2.0% | 11 |
| 125 | MAPK14 | 3091 | 187, 407 | 9.9 | 0.6% | 627, 845, 407 | 10.3 | 1.3% | 627, 1063, 407 | 24.7 | 1.5% | 11 |
| 126 | MAPK14 | 3312 | 188, 408 | 20.4 | 1.8% | 628, 846, 408 | 30.5 | 2.9% | 628, 1064, 408 | 38.5 | 3.4% | 13 |
| 127 | MAPK14 | 3346 | 189, 409 | 20.9 | 1.6% | 629, 847, 409 | 23.0 | 2.6% | 629, 1065, 409 | 58.3 | 6.7% | 11 |
| 128 | MAPK14 | 3531 | 190, 410 | 42.4 | 3.2% | 630, 848, 410 | 55.1 | 5.0% | 630, 1066, 410 | 61.9 | 3.6% | 12 |
| 129 | MAPK14 | 3621 | 191, 411 | 28.6 | 1.9% | 631, 849, 411 | 42.4 | 13.5% | 631, 1067, 411 | 71.9 | 5.2% | 11 |
| 130 | MAPK14 | 3680 | 192, 412 | 15.6 | 1.3% | 632, 850, 412 | 15.5 | 1.9% | 632, 1068, 412 | 19.8 | 2.1% | 12 |
| 131 | PDGFA | 1322 | 193, 413 | 23.7 | 3.6% | 633, 851, 413 | 31.6 | 4.3% | 633, 1069, 413 | 38.4 | 3.3% | 12 |
| 132 | PDGFA | 1332 | 194, 414 | 35.5 | 5.4% | 634, 852, 414 | 48.4 | 3.0% | 634, 1070, 414 | 65.4 | 10.5% | 14 |
| 133 | PDGFA | 1395 | 195, 415 | 25.9 | 3.3% | 635, 853, 415 | 40.2 | 6.0% | 635, 1071, 415 | 55.2 | 9.8% | 14 |
| 134 | PDGFA | 1669 | 196, 416 | 40.4 | 5.1% | 636, 854, 416 | 29.5 | 4.3% | 636, 1072, 416 | 33.9 | 5.9% | 12 |
| 135 | PDGFA | 1676 | 197, 417 | 27.1 | 2.5% | 637, 855, 417 | 36.8 | 4.5% | 637, 1073, 417 | 47.4 | 3.4% | 13 |
| 136 | PDGFA | 1748 | 198, 418 | 27.4 | 4.7% | 638, 856, 418 | 34.5 | 5.0% | 638, 1074, 418 | 47.5 | 4.7% | 11 |
| 137 | PDGFA | 2020 | 199, 419 | 31.6 | 6.6% | 639, 857, 419 | 37.5 | 4.3% | 639, 1075, 419 | 51.9 | 5.0% | 13 |
| 138 | PDGFA | 2021 | 200, 420 | 16.7 | 1.0% | 640, 858, 420 | 24.2 | 3.1% | 640, 1076, 420 | 62.6 | 6.9% | 14 |
| 139 | PDGFA | 2030 | 201, 421 | 38.7 | 6.2% | 641, 859, 421 | 47.0 | 10.5% | 641, 1077, 421 | 80.5 | 7.6% | 13 |
| 140 | PDGFA | 2300 | 202, 422 | 55.3 | 7.7% | 642, 860, 422 | 41.2 | 4.7% | 642, 1078, 422 | 71.7 | 9.1% | 15 |
| 141 | PDGFRA | 4837 | 203, 423 | 16.9 | 3.1% | 643, 861, 423 | 21.1 | 5.1% | 643, 1079, 423 | 23.1 | 4.8% | 12 |
| 142 | PDGFRA | 4900 | 204, 424 | 23.8 | 3.8% | 644, 862, 424 | 40.9 | 8.4% | 644, 1080, 424 | 62.5 | 12.5% | 16 |
| 143 | PDGFRA | 5007 | 205, 425 | 52.6 | 9.4% | 645, 863, 425 | 49.6 | 7.7% | 645, 1081, 425 | 47.0 | 9.5% | 12 |
| 144 | PDGFRA | 5043 | 206, 426 | 30.1 | 7.9% | 646, 864, 426 | 30.0 | 5.4% | 646, 1082, 426 | 57.3 | 7.8% | 11 |
| 145 | PDGFRA | 5082 | 207, 427 | 8.3 | 1.1% | 647, 865, 427 | 11.9 | 1.8% | 647, 1083, 427 | 18.2 | 4.0% | 13 |
| 146 | PDGFRA | 5352 | 208, 428 | 6.3 | 1.4% | 648, 866, 428 | 8.2 | 1.6% | 648, 1084, 428 | 7.9 | 1.1% | 12 |
| 147 | PDGFRA | 5367 | 209, 429 | 19.1 | 5.6% | 649, 867, 429 | 10.9 | 1.6% | 649, 1085, 429 | 25.1 | 2.9% | 14 |
| 148 | PDGFRA | 5496 | 210, 430 | 18.9 | 5.4% | 650, 868, 430 | 17.0 | 2.9% | 650, 1086, 430 | 17.8 | 4.0% | 12 |
| 149 | PDGFRA | 5706 | 211, 431 | 24.5 | 4.0% | 651, 869, 431 | 47.8 | 4.3% | 651, 1087, 431 | 50.6 | 5.5% | 13 |
| 150 | PDGFRA | 5779 | 212, 432 | 13.0 | 1.4% | 652, 870, 432 | 14.0 | 2.1% | 652, 1088, 432 | 17.2 | 4.3% | 14 |
| 151 | PIK3CA | 213 | 213, 433 | 4.3 | 1.0% | 653, 871, 433 | 3.7 | 0.6% | 653, 1089, 433 | 5.7 | 0.9% | 12 |
| 152 | PIK3CA | 389 | 214, 434 | 5.3 | 1.0% | 654, 872, 434 | 7.0 | 1.5% | 654, 1090, 434 | 5.6 | 1.5% | 10 |
| 153 | PIK3CA | 517 | 215, 435 | 9.6 | 1.1% | 655, 873, 435 | 11.5 | 2.1% | 655, 1091, 435 | 13.5 | 1.6% | 11 |
| 154 | PIK3CA | 630 | 216, 436 | 6.1 | 1.2% | 656, 874, 436 | 8.9 | 2.6% | 656, 1092, 436 | 9.3 | 1.8% | 12 |
| 155 | PIK3CA | 680 | 217, 437 | 3.8 | 0.3% | 657, 875, 437 | 5.9 | 0.6% | 657, 1093, 437 | 6.9 | 1.0% | 11 |
| 156 | PIK3CA | 732 | 218, 438 | 5.7 | 1.7% | 658, 876, 438 | 15.3 | 1.5% | 658, 1094, 438 | 17.4 | 4.0% | 11 |
| 157 | PIK3CA | 736 | 219, 439 | 5.9 | 0.9% | 659, 877, 439 | 7.8 | 1.1% | 659, 1095, 439 | 6.5 | 1.4% | 12 |
| 158 | PIK3CA | 923 | 220, 440 | 5.0 | 0.7% | 660, 878, 440 | 8.5 | 1.5% | 660, 1096, 440 | 7.4 | 0.6% | 12 |
| 159 | PIK3CA | 1087 | 221, 441 | 8.1 | 2.3% | 661, 879, 441 | 8.5 | 1.6% | 661, 1097, 441 | 17.5 | 4.9% | 12 |
| 160 | PIK3CA | 1094 | 222, 442 | 13.0 | 3.8% | 662, 880, 442 | 13.0 | 2.5% | 662, 1098, 442 | 30.1 | 6.4% | 11 |
| 161 | PKN3 | 2408 | 223, 443 | 9.4 | 2.1% | 663, 881, 443 | 15.2 | 3.7% | 663, 665, 443 | 32.1 | 6.6% | 12 |
| 162 | PKN3 | 2420 | 224, 444 | 14.5 | 1.7% | 664, 882, 444 | 30.4 | 7.5% | 664, 1099, 444 | 40.1 | 6.7% | 12 |
| 163 | PKN3 | 2421 | 225, 445 | 15.2 | 2.0% | 665, 883, 445 | 20.6 | 2.7% | 665, 1100, 445 | 50.8 | 7.8% | 12 |
| 164 | PKN3 | 2425 | 226, 446 | 28.4 | 3.8% | 666, 884, 446 | 27.0 | 6.9% | 666, 1101, 446 | 36.2 | 4.8% | 15 |
| 165 | PKN3 | 2682 | 227, 447 | 30.0 | 4.6% | 667, 885, 447 | 27.1 | 2.8% | 667, 1102, 447 | 37.1 | 6.2% | 11 |
| 166 | PKN3 | 2683 | 228, 448 | 22.4 | 2.8% | 668, 886, 448 | 34.8 | 2.2% | 668, 1103, 448 | 51.9 | 7.4% | 12 |
| 167 | PKN3 | 2931 | 229, 449 | 35.1 | 4.4% | 669, 887, 449 | 57.3 | 7.8% | 669, 1104, 449 | 88.6 | 7.1% | 13 |
| 168 | PKN3 | 3063 | 230, 450 | 21.8 | 3.1% | 670, 888, 450 | 28.6 | 8.5% | 670, 1105, 450 | 40.5 | 6.2% | 12 |
| 169 | PKN3 | 3314 | 231, 451 | 9.7 | 1.8% | 671, 889, 451 | 12.0 | 1.4% | 671, 1106, 451 | 17.3 | 1.3% | 10 |
| 170 | PKN3 | 3315 | 232, 452 | 10.1 | 1.3% | 672, 890, 452 | 15.3 | 2.8% | 672, 1107, 452 | 37.4 | 3.6% | 11 |
| 171 | RAF1 | 1509 | 233, 453 | 46.2 | 9.4% | 673, 891, 453 | 51.3 | 10.7% | 673, 1108, 453 | 61.3 | 4.4% | 12 |
| 172 | RAF1 | 1512 | 234, 454 | 40.1 | 9.7% | 674, 892, 454 | 34.5 | 5.6% | 674, 1109, 454 | 62.4 | 8.6% | 13 |
| 173 | RAF1 | 1628 | 235, 455 | 48.3 | 7.9% | 675, 893, 455 | 47.4 | 7.1% | 675, 1110, 455 | 41.1 | 5.1% | 12 |
| 174 | RAF1 | 1645 | 236, 456 | 38.9 | 2.3% | 676, 894, 456 | 62.1 | 9.0% | 676, 1111, 456 | 85.0 | 9.3% | 13 |
| 175 | RAF1 | 1780 | 237, 457 | 22.6 | 4.9% | 677, 895, 457 | 24.8 | 5.3% | 677, 1112, 457 | 37.6 | 10.4% | 12 |
| 176 | RAF1 | 1799 | 238, 458 | 23.2 | 3.1% | 678, 896, 458 | 43.6 | 7.6% | 678, 1113, 458 | 50.7 | 6.2% | 12 |
| 177 | RAF1 | 1807 | 239, 459 | 28.0 | 5.4% | 679, 897, 459 | 34.8 | 5.8% | 679, 1114, 459 | 37.0 | 5.3% | 15 |
| 178 | RAF1 | 1863 | 240, 460 | 28.2 | 3.1% | 680, 898, 460 | 38.1 | 4.5% | 680, 1115, 460 | 35.7 | 4.2% | 14 |
| 179 | RAF1 | 2157 | 241, 461 | 68.8 | 6.5% | 681, 899, 461 | 64.1 | 8.0% | 681, 1116, 461 | 86.7 | 12.6% | 14 |
| 180 | RAF1 | 2252 | 242, 462 | 11.4 | 1.7% | 682, 900, 462 | 25.8 | 5.4% | 682, 1117, 462 | 71.2 | 10.7% | 13 |
| 181 | SRD5A1 | 1150 | 243, 463 | 3.7 | 0.5% | 683, 901, 463 | 4.4 | 0.7% | 683, 1118, 463 | 3.8 | 0.4% | 12 |
| 182 | SRD5A1 | 1153 | 244, 464 | 3.2 | 0.4% | 684, 902, 464 | 5.2 | 0.5% | 684, 1119, 464 | 7.0 | 0.9% | 12 |
| 183 | SRD5A1 | 1845 | 245, 465 | 3.9 | 0.5% | 685, 903, 465 | 4.5 | 0.6% | 685, 1120, 465 | 7.4 | 0.8% | 13 |
| 184 | SRD5A1 | 1917 | 246, 466 | 9.4 | 0.8% | 686, 904, 466 | 10.2 | 1.3% | 686, 1121, 466 | 22.0 | 2.8% | 12 |
| 185 | SRD5A1 | 1920 | 247, 467 | 4.6 | 0.3% | 687, 905, 467 | 4.9 | 1.0% | 687, 1122, 467 | 6.4 | 0.5% | 11 |
| 186 | SRD5A1 | 1964 | 248, 468 | 6.2 | 0.7% | 688, 906, 468 | 10.4 | 0.7% | 688, 1123, 468 | 21.0 | 4.6% | 10 |
| 187 | SRD5A1 | 1981 | 249, 469 | 6.5 | 1.0% | 689, 907, 469 | 7.1 | 0.7% | 689, 1124, 469 | 8.8 | 1.5% | 12 |
| 188 | SRD5A1 | 2084 | 250, 470 | 16.9 | 1.1% | 690, 908, 470 | 15.7 | 1.5% | 690, 1125, 470 | 13.3 | 1.5% | 12 |
| 189 | SRD5A1 | 2085 | 251, 471 | 17.3 | 1.6% | 691, 909, 471 | 19.4 | 1.7% | 691, 1126, 471 | 20.8 | 2.6% | 12 |
| 190 | SRD5A1 | 2103 | 252, 472 | 7.5 | 1.3% | 692, 910, 472 | 10.9 | 1.2% | 692, 1127, 472 | 12.3 | 1.7% | 12 |
| 191 | TNF | 32 | 253, 473 | 71.4 | 13.2% | 693, 911, 473 | 93.7 | 14.9% | 693, 1128, 473 | 122.6 | 21.1% | 12 |
| 192 | TNF | 649 | 254, 474 | 100.0 | 16.3% | 694, 912, 474 | 127.7 | 12.6% | 694, 1129, 474 | 147.9 | 21.7% | 12 |
| 193 | TNF | 802 | 255, 475 | 67.2 | 10.7% | 695, 913, 475 | 64.0 | 6.6% | 695, 1130, 475 | 116.4 | 21.0% | 12 |
| 194 | TNF | 875 | 256, 476 | 101.7 | 19.9% | 696, 914, 476 | 99.3 | 15.5% | 696, 1131, 476 | 108.8 | 14.2% | 12 |
| 195 | TNF | 983 | 257, 477 | 94.5 | 7.0% | 697, 915, 477 | 83.1 | 7.3% | 697, 1132, 477 | 140.6 | 20.4% | 11 |
| 196 | TNF | 987 | 258, 478 | 82.0 | 10.9% | 698, 916, 478 | 139.4 | 8.2% | 698, 1133, 478 | 143.8 | 9.2% | 10 |
| 197 | TNF | 992 | 259, 479 | 126.7 | 15.8% | 699, 700, 479 | 121.7 | 10.8% | 699, 1134, 479 | 115.9 | 16.4% | 11 |
| 198 | TNF | 1003 | 260, 480 | 123.4 | 16.7% | 700, 917, 480 | 114.4 | 47.8% | 700, 1135, 480 | 98.5 | 17.2% | 14 |
| 199 | TNF | 1630 | 261, 481 | 58.0 | 5.7% | 701, 918, 481 | 56.1 | 9.4% | 701, 1136, 481 | 71.0 | 17.2% | 11 |
| 200 | TNF | 1631 | 262, 482 | 54.2 | 13.4% | 702, 919, 482 | 63.9 | 10.1% | 702, 1137, 482 | 73.8 | 14.8% | 11 |
| 201 | TNFSF13B | 188 | 263, 483 | 20.4 | 3.2% | 703, 920, 483 | 46.2 | 11.9% | 703, 1138, 483 | 58.4 | 12.7% | 13 |
| 202 | TNFSF13B | 313 | 264, 484 | 15.9 | 5.1% | 704, 921, 484 | 18.9 | 7.4% | 704, 1139, 484 | 48.0 | 8.1% | 12 |
| 203 | TNFSF13B | 337 | 265, 485 | 22.3 | 4.6% | 705, 922, 485 | 37.1 | 11.0% | 705, 1140, 485 | 63.6 | 10.4% | 12 |
| 204 | TNFSF13B | 590 | 266, 486 | 35.8 | 8.7% | 706, 923, 486 | 49.4 | 11.0% | 706, 1141, 486 | 50.7 | 10.3% | 10 |
| 205 | TNFSF13B | 652 | 267, 487 | 21.3 | 7.2% | 707, 924, 487 | 57.6 | 16.7% | 707, 1142, 487 | 78.8 | 5.6% | 14 |
| 206 | TNFSF13B | 661 | 268, 488 | 28.8 | 3.0% | 708, 925, 488 | 38.3 | 8.4% | 708, 1143, 488 | 56.5 | 16.3% | 12 |
| 207 | TNFSF13B | 684 | 269, 489 | 46.3 | 7.2% | 709, 926, 489 | 43.8 | 9.7% | 709, 1144, 489 | 54.5 | 4.6% | 12 |
| 208 | TNFSF13B | 905 | 270, 490 | 18.5 | 5.0% | 710, 927, 490 | 27.9 | 3.1% | 710, 1145, 490 | 51.7 | 10.9% | 12 |
| 209 | TNFSF13B | 961 | 271, 491 | 21.4 | 4.0% | 711, 928, 491 | 37.5 | 10.1% | 711, 1146, 491 | 77.6 | 11.2% | 14 |
| 210 | TNFSF13B | 1150 | 272, 492 | 24.1 | 7.0% | 712, 929, 492 | 23.4 | 5.7% | 712, 1147, 492 | 35.9 | 8.0% | 13 |
| 211 | VEGFA | 1426 | 273, 493 | 14.5 | 2.2% | 713, 930, 493 | 18.1 | 3.2% | 713, 1148, 493 | 21.0 | 3.8% | 13 |
| 212 | VEGFA | 1428 | 274, 494 | 18.5 | 2.6% | 714, 931, 494 | 32.1 | 5.8% | 714, 1149, 494 | 46.7 | 9.4% | 12 |
| 213 | VEGFA | 1603 | 275, 495 | 14.6 | 2.1% | 715, 932, 495 | 36.6 | 17.5% | 715, 1150, 495 | 65.6 | 6.9% | 13 |
| 214 | VEGFA | 1685 | 276, 496 | 17.1 | 1.3% | 716, 933, 496 | 20.2 | 5.5% | 716, 1151, 496 | 23.4 | 3.8% | 13 |
| 215 | VEGFA | 1792 | 277, 497 | 17.0 | 1.8% | 717, 934, 497 | 21.2 | 3.2% | 717, 1152, 497 | 39.5 | 6.3% | 12 |
| 216 | VEGFA | 2100 | 278, 498 | 116.9 | 11.5% | 718, 935, 498 | 103.6 | 7.5% | 718, 1153, 498 | 101.5 | 12.9% | 12 |
| 217 | VEGFA | 2102 | 279, 499 | 116.3 | 9.1% | 719, 936, 499 | 110.2 | 9.3% | 719, 1154, 499 | 105.0 | 8.0% | 12 |
| 218 | VEGFA | 2196 | 280, 500 | 24.2 | 2.7% | 720, 937, 500 | 26.6 | 3.1% | 720, 1155, 500 | 43.5 | 3.5% | 12 |
| 219 | VEGFA | 2261 | 281, 501 | 15.6 | 2.2% | 721, 938, 501 | 44.2 | 6.2% | 721, 1156, 501 | 109.0 | 9.8% | 12 |
| 220 | VEGFA | 2292 | 282, 502 | 48.4 | 4.3% | 722, 939, 502 | 45.1 | 7.2% | 722, 1157, 502 | 80.7 | 6.7% | 15 |

*All samples were normalized to the respective dsRNA QNeg (Qiagen) negative control samples run in the same experiment. That is, QNeg values were set as 100% active (i.e., no knockdown), with 95% confidence intervals (CI) ranging from 6.3-22.5%. As a positive control, an siRNA specific for rLuc was used, which samples showed on average expression levels that varied from 1.2% to 16.8% (i.e., about 83% to about 99% knockdown activity and a 95% CI ranging from 0.3% to 13.7%).
†“Pos” refers to the position on the target gene mRNA message that aligns with the 5′-end of the dsRNA sense strand. The mRNA numbering is based on the GenBank accession numbers as described herein.
‡The SEQ ID NOS. are provided in the following order: (1) Dicer: sense strand, antisense strand; (2) Nicked: 5′-sense strand fragment, 3′-sense strand fragment, and antisense strand; and (3) Gapped: 5′-sense strand fragment, 3′-sense strand fragment, and antisense strand. The Dicer dsRNA has two strands, while ndsRNA and gdsRNA have three strands each. The nicked or gapped sense strand fragments have three locked nucleic acids each.
\hat{ }“Length 5′-S” refers to the length of the 5′-sense strand fragment of the nicked or gapped mdRNA, which indicates the position of the nick (e.g., 10 means the nick is between position 10 and 11, so the 5′sense strand fragment is 10 nucleotides long and the 3′-sense strand fragment is 15 nucelotides long) or one nucleotide gap (e.g., 10 means the missing nucleotide is number 11, so the 5′sense strand fragment is 10 nucleotides long and the 3′-sense strand fragment is 14 nucelotides long).

### Example 2

### Knockdown of β-Galactosidase Activity by Gapped dsRNA Dicer Substrate

[0202] The activity of a Dicer substrate dsRNA containing a gap in the double-stranded structure in silencing LacZ mRNA as compared to the normal Dicer substrate dsRNA (i.e., not having a gap) was examined.

Nucleotide Sequences of dsRNA and mdRNA Targeting LacZ mRNA

[0203] The nucleic acid sequence of the one or more sense strands, and the antisense strand of the dsRNA and gapped dsRNA (also referred to herein as a meroduplex or mdRNA) are shown below and were synthesized using standard techniques. The RISC activator LacZ dsRNA comprises a 21 nucleotide sense strand and a 21 nucleotide antisense strand, which can anneal to form a double-stranded region of 19 base pairs with a two deoxythymidine overhang on each strand (referred to as 21/21 dsRNA).

| LacZ dsRNA (21/21)-RISC Activator | |
|---|---|
| (SEQ ID NO: 1) | |
| Sense | 5′-CUACACAAAUCAGCGAUUUdTdT-3′ |
| (SEQ ID NO: 2) | |
| Antisense | 3′-dTdTGAUGUGUUUAGUCGCUAAA-5′ |

[0204] The Dicer substrate LacZ dsRNA comprises a 25 nucleotide sense strand and a 27 nucleotide antisense strand, which can anneal to form a double-stranded region of 25 base pairs with one blunt end and a cytidine and uridine overhang on the other end (referred to as 25/27 dsRNA).

| LacZ dsRNA (25/27)-Dicer Substrate | |
|---|---|
| (SEQ ID NO: 3) | |
| Sense | 5′-CUACACAAAUCAGCGAUUUCCAUdGdT-3′ |
| (SEQ ID NO: 4) | |
| Antisense | 3′-CUGAUGUGUUUAGUCGCUAAAGGUA C A-5′ |

The LacZ mdRNA comprises two sense strands of 13 nucleotides (5′-portion) and 11 nucleotides (3′-portion) and a 27 nucleotide antisense strand, which three strands can anneal to form two double-stranded regions of 13 and 11 base pairs separated by a single nucleotide gap (referred to as a 13, 11/27 mdRNA). The 5′-end of the 11 nucleotide sense strand fragment may be optionally phosphorylated. The “*” indicates a gap—in this case, a single nucleotide gap (i.e., a cytidine is missing).

| LacZ mdRNA (13, 11/27)-Dicer Substrate | |
|---|---|
| (SEQ ID NOS: 5, 6) | |
| Sense | 5′-CUACACAAAUCAG*GAUUUCCAUdGdT-3′ |
| (SEQ ID NO: 4) | |
| Antisense | 3′-CUGAUGUGUUUAGUCGCUAAAGGUA C A-5′ |

Each of the LacZ dsRNA or mdRNA was used to transfect 9lacZ/R cells.

### Transfection

[0205] Six well collagen-coated plates were seeded with 5×10⁵ 9lacZ/R cells/well in a 2 ml volume per well, and incubated overnight at 37° C./5% CO₂ in DMEM/high glucose media. Preparation for transfection: 250 μl of OPTIMEM media without serum was mixed with 5 μl of 20 pmol/μl dsRNA and Sul of HIPERFECT transfection solution (Qiagen) was mixed with another 250 μl OPTIMEM media. After both mixtures were allowed to equilibrate for 5 minutes, the RNA and transfection solutions were combined and left at room temperature for 20 minutes to form transfection complexes. The final concentration of HIPERFECT was 50 μM, and the dsRNAs were tested at 0.05 nM, 0.1 nM, 0.2 nM, 0.5 nM, 1 nM, 2 nM, 5 nM, and 10 nM, while the mdRNA was tested at 0.2 nM, 0.5 nM, 1 nM, 2 nM, 5 nM, 10 nM, 20 nM, and 50 nM. Complete media was removed, the cells were washed with incomplete OPTIMEM, and then 500 μl transfection mixture was applied to the cells, which were incubated with gentle shaking at 37° C. for 4 hours. After transfecting, the transfection media was removed, cells were washed once with complete DMEM/high glucose media, fresh media added, and the cells were then incubated for 48 hours at 37° C., 5% CO₂.

### β-Galactosidase Assay

[0206] Transfected cells were washed with PBS, and then detached with 0.5 ml trypsin/EDTA. The detached cells were suspended in 1 ml complete DMEM/high glucose and transferred to a clean tube. The cells were harvested by centrifugation at 250×g for 5 minutes, and then resuspended in 50 μl 1× lysis buffer at 4° C. The lysed cells were subjected to two freeze-thaw cycles on dry ice and a 37° C. water bath. The lysed samples were centrifuged for 5 minutes at 4° C. and the supernatant was recovered. For each sample, 1.5 μl and 10 μl of lysate was transferred to a clean tube and sterile water added to a final volume of 30 μl followed by the addition of 70 μl o-nitrophenyl-β-D-galactopyranose (ONPG) and 200 μl 1× cleavage buffer with β-mercaptoethanol. The samples were mixed briefly, incubated for 30 minutes at 37° C., and then 500 μl stop buffer was added (final volume 800 μl). β-Galactosidase activity for each sample was measured in disposable cuvettes at 420 nm. Protein concentration was determined by the BCA (bicinchoninic acid) method. For the purpose of the instant example, the level of measured LacZ activity was correlated with the quantity of LacZ transcript within 9 L/LacZ cells. Thus, a reduction in β-galactosidase activity after dsRNA transfection, absent a negative impact on cell viability, was attributed to a reduction in the quantity of LacZ transcripts resulting from targeted degradation mediated by the LacZ dsRNA.

### Results

[0207] Knockdown activity in transfected and untransfected cells was normalized to a Qneg control dsRNA and presented as a normalized value of the Qneg control (i.e., Qneg represented 100% or “normal” gene expression levels). Both the lacZ RISC activator and Dicer substrate dsRNAs molecule showed good knockdown of β-galactosidase activity at concentration as low as 0.1 nM (FIG. 2), while the Dicer substrate antisense strand alone (single stranded 27 mer) had no silencing effect. A gapped mdRNA showed good knockdown although somewhat lower than that of intact RISC activator and Dicer substrate dsRNAs (FIG. 2). The presence of the gapmer cytidine (i.e., the missing nucleotide) at various concentrations (0.1 μM to 50 μM) had no effect on the activity of the mdRNA (data not shown). None of the dsRNA or mdRNA solutions showed any detectable toxicity in the transfected 9 L/LacZ cells. The IC₅₀ of the lacZ mdRNA was calculated to be 3.74 nM, which is about 10 fold lower than what had been previously measured for lacZ dsRNA 21/21 (data not shown). These results show that a meroduplex (gapped dsRNA) is capable of inducing gene silencing.

### Example 3

### Knockdown of Influenze Gene Expression by Nicked dsRNA

[0208] The activity of a nicked dsRNA (21/21) in silencing influenza gene expression as compared to a normal dsRNA (i.e., not having a nick) was examined.

Nucleotide Sequences of dsRNA and mdRNA Targeting Influenza mRNA

[0209] The dsRNA and nicked dsRNA (another form of meroduplex, referred to herein as ndsRNA) are shown below and were synthesized using standard techniques. The RISC activator influenza G1498 dsRNA comprises a 21 nucleotide sense strand and a 21 nucleotide antisense strand, which can anneal to form a double-stranded region of 19 base pairs with a two deoxythymidine overhang on each strand.

| G1498-wt dsRNA (21/21) | |
|---|---|
| (SEQ ID NO: 7) | |
| Sense | 5′-GGAUCUUAUUUCUUCGGAGdTdT-3′ |
| (SEQ ID NO: 8) | |
| Antisense | 3′-dTdTCCUAGAAUAAAGAAGCCUC-5′ |

[0210] The RISC activator influenza G1498 dsRNA was nicked on the sense strand after nucleotide 11 to produce a ndsRNA having two sense strands of 11 nucleotides (5′-portion, italic) and 10 nucleotides (3′-portion) and a 21 nucleotide antisense strand, which three strands can anneal to form two double-stranded regions of 11 (shown in italics) and 10 base pairs separated by a one nucleotide gap (which may be referred to as G1498 11, 10/21 ndsRNA-wt). The 5′-end of the 10 nucleotide sense strand fragment may be optionally phosphorylated, as depicted by a “p” preceding the nucleotide (e.g., pC).

| G1498 ndsRNA-wt (11, 10/21) | |
|---|---|
| (SEQ ID NO: 9, 10) | |
| Sense | 5′-GGAUCUUAUUUCUUCGGAGdTdT-3′ |
| (SEQ ID NO: 8) | |
| Antisense | 3′-dTdTCCUAGAAUAAAGAAGCCUC-5′ |
| G1498 ndsRNA-wt (11, 10/21) | |
| (SEQ ID NOS: 9, 10) | |
| Sense | 5′-GGAUCUUAUUUpCUUCGGAGdTdT-3′ |
| (SEQ ID NO: 8) | |
| Antisense | 3′-dTdTCCUAGAAUAAAGAAGCCUC-5′ |

In addition, each of these G1498 dsRNAs were made with each U substituted with a 5-methyluridine (ribothymidine) and are referred to as G1498 dsRNA-rT. Each of the G1498 dsRNA or ndsRNA (meroduplex), with or without the 5-methyluridine substitution, was used to transfect HeLa S3 cells having an influenza target sequence associated with a luciferase gene. Also, the G1498 antisense strand alone or the antisense strand annealed to the 11 nucleotide sense strand portion alone or the 10 nucleotide sense strand portion alone were examined for activity.

### Transfection and Dual Luciferase Assay

[0211] The reporter plasmid psiCHECK™-2 (Promega, Madison, Wis.), which constitutively expresses both firefly luc2 (Photinus pyralis) and Renilla (Renilla reniformis, also known as sea pansy) luciferases, was used to clone in a portion of the influenza NP gene downstream of the Renilla translational stop codon that results in a Renilla-influenza NP fusion mRNA. The firefly luciferase in the psiCHECK™-2 vector is used to normalize Renilla luciferase expression and serves as a control for transfection efficiency.

[0212] Multi-well plates were seeded with HeLa S3 cells/well in 100 μl Ham's F12 medium and 10% fetal bovine serum, and incubated overnight at 37° C./5% CO₂. The HeLa S3 cells were transfected with the psiCHECK™-influenza plasmid (75 ng) and G1498 dsRNA or ndsRNA (final concentration of 10 nM or 100 nM) formulated in Lipofectamine™ 2000 and OPTIMEM reduced serum medium. The transfection mixture was incubated with the HeLa S3 cells with gentle shaking at 37° C. for about 18 to 20 hours.

[0213] After transfecting, firefly luciferase reporter activity was measured first by adding Dual-Glo™ Luciferase Reagent (Promega, Madison, Wis.) for 10 minutes with shaking, and then quantitating the luminescent signal using a VICTOR³™ 1420 Multilabel Counter (PerkinElmer, Waltham, Mass.). After measuring the firefly luminescence, Stop & Glo® Reagent (Promega, Madison, Wis.) was added for 10 minutes with shaking to simultaneously quench the firefly reaction and initiate the Renilla luciferase reaction, and then the Renilla luciferase luminescent signal was quantitated VICTOR³™ 1420 Multilabel Counter (PerkinElmer, Waltham, Mass.).

### Results

[0214] Knockdown activity in transfected and untransfected cells was normalized to a Qneg control dsRNA and presented as a normalized value of the Qneg control (i.e., Qneg represented 100% or “normal” gene expression levels). Thus, a smaller value indicates a greater knockdown effect. The G1498 dsRNA-wt and dsRNA-rT showed similar good knockdown at a 100 nM concentration (FIG. 3). The G1498 ndsRNA-rT, whether phosphorylated or not, showed good knockdown although somewhat lower than the G1498 dsRNA-wt (FIG. 3). Similar results were obtained with dsRNA or ndsRNA at 10 nM (data not shown). None of the G1498 dsRNA or ndsRNA solutions showed any detectable toxicity in HeLa S3 cells at either 10 nM or 100 nM. Even the presence of only half a nicked sense strand (an 11 nucleotide or 10 nucleotide strand alone) with a G1498 antisense strand showed some detectable activity. These results show that a nicked-type meroduplex dsRNA molecule is unexpectedly capable of promoting gene silencing.

### Example 4

### Knockdown Activity of Nicked mdRNA

[0215] In this example, the activity of a dicer substrate LacZ dsRNA of Example 1 having a sense strand with a nick at various positions was examined. In addition, a dideoxy nucleotide (i.e., ddG) was incorporated at the 5′-end of the 3′-most strand of a sense sequence having a nick or a single nucleotide gap to determine whether the in vivo ligation of the nicked sense strand is “rescuing” activity. The ddG is not a substrate for ligation. Also examined was the influenza dicer substrate dsRNA of Example 7 having a sense strand with a nick at one of positions 8 to 14. The “p” designation indicates that the 5′-end of the 3′-most strand of the nicked sense influenza sequence was phosphorylated. The “L” designation indicates that the G at position 2 of the 5′-most strand of the nicked sense influenza sequence was substituted for a locked nucleic acid G. The Qneg is a negative control dsRNA.

[0216] The dual fluorescence assay of Example 3 was used to measure knockdown activity with 5 nM of the LacZ sequences and 0.5 nM of the influenza sequences. The lacZ dicer substrate (25/27, LacZ-DS) and lacZ RISC activator (21/21, LacZ) are equally active, and the LacZ-DS can be nicked in any position between 8 and 14 without affecting activity (FIG. 3). In addition, the inclusion of a ddG on the 5′-end of the 3′-most LacZ sense sequence having a nick (LacZ:DSNkd13-3′dd) or a one nucleotide gap (LacZ:DSNkd13D1-3′dd) was essentially as active as the unsubstituted sequence (FIG. 4). The influenza dicer substrate (G1498DS) nicked at any one of positions 8 to 14 was also highly active (FIG. 5). Phosphorylation of the 5′-end of the 3′-most strand of the nicked sense influenza sequence had essentially no effect on activity, but addition of a locked nucleic acid appears to improve activity.

### Example 5

### Mean Inhibitory Concentration of mdRNA

[0217] In this example, a dose response assay was performed to measure the mean inhibitory concentration (IC₅₀) of the influenza dicer substrate dsRNA of Example 8 having a sense strand with a nick at position 12, 13, or 14, including or not a locked nucleic acid. The dual luciferase assay of Example 2 was used. The influenza dicer substrate dsRNA (G1498DS) was tested at 0.0004 nM, 0.002 nM, 0.005 nM, 0.019 nM, 0.067 nM, 0.233 nM, 0.816 nM, 2.8 nM, and 10 nM, while the mdRNA with a nick at position 13 (G1498DS:Nkd13) was tested at 0.001 nM, 0.048 nM, 0.167 nM, 1 nM, 2 nM, 7 nM, and 25 nM (see FIG. 6). Also tested were RISC activator molecules (21/21) with or without a nick at various positions (including G1498DS:Nkdl 1, G1498DS:Nkd12, and G1498DS:Nkd14), each of the nicked versions with a locked nucleic acid as described above (data not shown). The Qneg is a negative control dsRNA.

[0218] The IC₅₀ of the RISC activator G1498 was calculated to be about 22 pM, while the dicer substrate G1498DS IC₅₀ was calculated to be about 6 pM. The IC₅₀ of RISC and Dicer mdRNAs range from about 200 pM to about 15 nM. The inclusion of a single locked nucleic acid reduced the IC₅₀ of Dicer mdRNAs by up 4 fold (data not shown). These results show that a meroduplex dsRNA having a nick or gap in any position is capable of inducing gene silencing.

### Example 6

### Knockdown Activity of Gapped mdRNA

[0219] The activity of an influenza dicer substrate dsRNA having a sense strand with a gap of differing sizes and positions was examined. The influenza dicer substrate dsRNA of Example 8 was generated with a sense strand having a gap of 0 to 6 nucleotides at position 8, a gap of 4 nucleotides at position 9, a gap of 3 nucleotides at position 10, a gap of 2 nucleotides at position 11, and a gap of 1 nucleotide at position 12 (see Table 2). The Qneg is a negative control dsRNA. Each of the mdRNAs was tested at a concentration of 5 nM (data not shown) and 10 nM. The mdRNAs have the following antisense strand 5′-CAUUGUCUCCGAAGAAAUAAGAUCCUU (SEQ ID NO:11), and nicked or gapped sense strands as shown in Table 2.

TABLE 2

| | | | Gap | Gap | % |
|---|---|---|---|---|---|
| mdRNA | 5′ Sense* (SEQ ID NO.) | 3′ Sense (SEQ ID NO.) | Pos | Size | KD^{†} |
| G1498: DSNkd8 | GGAUCUUA (12) | UUUCUUCGGAGACAAdTdG (13) | 8 | 0 | 67.8 |
| G1498: DSNkd8D1 | GGAUCUUA (12) | UUCUUCGGAGACAAdTdG (14) | 8 | 1 | 60.9 |
| G1498: DSNkd8D2 | GGAUCUUA (12) | UCUUCGGAGACAAdTdG (15) | 8 | 2 | 48.2 |
| G1498: DSNkd8D3 | GGAUCUUA (12) | CUUCGGAGACAAdTdG (16) | 8 | 3 | 44.1 |
| G1498: DSNkd8D4 | GGAUCUUA (12) | UUCGGAGACAAdTdG (17) | 8 | 4 | 30.8 |
| G1498: DSNkd8D5 | GGAUCUUA (12) | UCGGAGACAAdTdG (18) | 8 | 5 | 10.8 |
| G1498: DSNkd8D6 | GGAUCUUA (12) | CGGAGACAAdTdG (19) | 8 | 6 | 17.9 |
| G1498: DSNkd9D4 | GGAUCUUAU (20) | UCGGAGACAAdTdG (18) | 9 | 4 | 38.9 |
| G1498: DSNkd10D3 | GGAUCUUAUU (21) | UCGGAGACAAdTdG (18) | 10 | 3 | 38.4 |
| G1498: DSNkdl1D2 | GGAUCUUAUUU (22) | UCGGAGACAAdTdG (18) | 11 | 2 | 46.2 |
| G1498: DSNkdl2D1 | GGAUCUUAUUUC (23) | UCGGAGACAAdTdG (18) | 12 | 1 | 49.6 |
| Plasmid | — | — | — | — | 5.3 |

*G indicates a locked nucleic acid G in the 5′ sense strand.
^{†}% KD means percent knockdown activity.

[0220] The dual fluorescence assay of Example 2 was used to measure knockdown activity. Similar results were obtained at both the 5 nM and 10 nM concentrations. These data show that an mdRNA having a gap of up to 6 nucleotides still has activity, although having four or fewer missing nucleotides shows the best activity (see, also, FIG. 7). Thus, mdRNA having various sizes gaps that are in various different positions have knockdown activity.

[0221] To examine the general applicability of a sequence having a sense strand with a gap of differing sizes and positions, a different dsRNA sequence was tested. The lacZ RISC dsRNA of Example 1 was generated with a sense strand having a gap of 0 to 6 nucleotides at position 8, a gap of 5 nucleotides at position 9, a gap of 4 nucleotides at position 10, a gap of 3 nucleotides at position 11, a gap of 2 nucleotides at position 12, a gap of 1 nucleotide at position 12, and a nick (gap of 0) at position 14 (see Table 3). The Qneg is a negative control dsRNA. Each of the mdRNAs was tested at a concentration of 5 nM (data not shown) and 25 nM. The lacZ mdRNAs have the following antisense strand 5′-AAAUCGCUGAUUUGUGUAGdTdTUAAA (SEQ ID NO:2) and nicked or gapped sense strands as shown in Table 3.

TABLE 3

| | 5′ Sense* | 3′ Sense* | Gap | Gap |
|---|---|---|---|---|
| mdRNA | (SEQ ID NO.) | (SEQ ID NO.) | Pos | Size |
| LacZ: Nkd8 | CUACACAA (24) | AUCAGCGAUUUdTdT (25) | 8 | 0 |
| LacZ: Nkd8D1 | CUACACAA (24) | UCAGCGAUUUdTdT (26) | 8 | 1 |
| LacZ: Nkd8D2 | CUACACAA (24) | CAGCGAUUUdTdT (27) | 8 | 2 |
| LacZ: Nkd8D3 | CUACACAA (24) | AGCGAUUUdTdT (28) | 8 | 3 |
| LacZ: Nkd8D4 | CUACACAA (24) | GCGAUUUdTdT (29) | 8 | 4 |
| LacZ: Nkd8D5 | CUACACAA (24) | CGAUUUdTdT (30) | 8 | 5 |
| LacZ: Nkd8D6 | CUACACAA (24) | GAUUUdTdT (31) | 8 | 6 |
| LacZ: Nkd9D5 | CUACACAAA (32) | GAUUUdTdT (31) | 9 | 5 |
| LacZ: Nkd10D4 | CUACACAAAU (33) | GAUUUdTdT (31) | 10 | 4 |
| LacZ: Nkd11D3 | CUACACAAAUC (34) | GAUUUdTdT (31) | 11 | 3 |
| LacZ: Nkdl2D2 | CUACACAAAUCA (35) | GAUUUdTdT (31) | 12 | 2 |
| LacZ: Nkd13D1 | CUACACAAAUCAG (36) | GAUUUdTdT (31) | 13 | 1 |
| LacZ: Nkd14 | CUACACAAAUCAGC (37) | GAUUUdTdT (31) | 14 | 0 |

*A indicates a locked nucleic acid A in each sense strand.

[0222] The dual fluorescence assay of Example 3 was used to measure knockdown activity. FIG. 8 shows that an mdRNA having a gap of up to 6 nucleotides has substantial activity and the position of the gap may affect the potency of knockdown. Thus, mdRNA having various sizes gaps that are in various different positions and in different mdRNA sequences have knockdown activity.

### Example 7

### Knockdown Activity of Substituted mdRNA

[0223] The activity of an influenza dsRNA RISC sequences having a nicked sense strand and the sense strands having locked nucleic acid substitutions were examined. The influenza RISC sequence G1498 of Example 3 was generated with a sense strand having a nick at positions 8 to 14 counting from the 5′-end. Each sense strand was substituted with one or two locked nucleic acids as shown in Table 4. The Qneg and Plasmid are negative controls. Each of the mdRNAs was tested at a concentration of 5 nM. The antisense strand used was 5′-CUCCGAAGAAAUAAGAUCCdTdT (SEQ ID NO:8).

TABLE 4

| | 5′ Sense* | 3′ Sense* | Nick | % |
|---|---|---|---|---|
| mdRNA | (SEQ ID NO.) | (SEQ ID NO.) | Pos | KD |
| G1498-wt | GGAUCUUAUUUCUUCGGAGdTdT (7) | — | — | 85.8 |
| G1498-L | GGAUCUUAUUUCUUCGGAGdTdT (61) | — | — | 86.8 |
| G1498: Nkd8-1 | GGAUCUUA (12) | UUUCUUCGGAGdTdT (47) | 8 | 36.0 |
| G1498: Nkd8-2 | GGAUCUUA (40) | UUUCUUCGGAGdTdT (54) | 8 | 66.2 |
| G1498: Nkd9-1 | GGAUCUUAU (20) | UUCUUCGGAGdTdT (48) | 9 | 60.9 |
| G1498: Nkd9-2 | GGAUCUUAU (41) | UUCUUCGGAGdTdT (55) | 9 | 64.4 |
| G1498: Nkd10-1 | GGAUCUUAUU (21) | UCUUCGGAGdTdT (49) | 10 | 58.2 |
| G1498: Nkd10-2 | GGAUCUUAUU (42) | UCUUCGGAGdTdT (56) | 10 | 68.5 |
| G1498: Nkd11-1 | GGAUCUUAUUU (22) | CUUCGGAGdTdT (50) | 11 | 75.9 |
| G1498: Nkd11-2 | GGAUCUUAUUU (43) | CUUCGGAGdTdT (57) | 11 | 67.1 |
| G1498: Nkd12-1 | GGAUCUUAUUUC (23) | UUCGGAGdTdT (51) | 12 | 59.9 |
| G1498: Nkd12-2 | GGAUCUUAUUUC (44) | UUCGGAGdTdT (58) | 12 | 72.8 |
| G1498: Nkd13-1 | GGAUCUUAUUUCU (38) | UCGGAGdTdT (52) | 13 | 37.1 |
| G1498: Nkd13-2 | GGAUCUUAUUUCU (45) | UCGGAGdTdT (59) | 13 | 74.3 |
| G1498: Nkd14-1 | GGAUCUUAUUUCUU (39) | CGGAGdTdT (53) | 14 | 29.0 |
| G1498: Nkd14-2 | GGAUCUUAUUUCUU (46) | CGGAGdTdT (60) | 14 | 60.2 |
| Qneg | — | — | — | 0 |
| Plasmid | — | — | — | 3.6 |

*Nucleotides that are bold and underlined are locked nucleic acids.

[0224] The dual fluorescence assay of Example 3 was used to measure knockdown activity. These data show that increasing the number of locked nucleic acid substitutions tends to increase activity of an mdRNA having a nick at any of a number of positions. The single locked nucleic acid per sense strand appears to be most active when the nick is at position 11 (see FIG. 9). But, multiple locked nucleic acids on each sense strand make mdRNA having a nick at any position as active as the most optimal nick position with a single substitution (i.e., position 11) (FIG. 9). Thus, mdRNA having duplex stabilizing modifications make mdRNA essentially equally active regardless of the nick position.

[0225] Similar results were observed when locked nucleic acid substitutions were made in the LacZ dicer substrate mdRNA of Example 2 (SEQ ID NOS:3 and 4). The lacZ dicer was nicked at positions 8 to 14, and a duplicate set of nicked LacZ dicer molecules were made with the exception that the A at position 3 (from the 5′-end) of the 5′ sense strand was substituted for a locked nucleic acid A (LNA-A). As is evident from FIG. 10, most of the nicked lacZ dicer molecules containing LNA-A were as potent in knockdown activity as the unsubstituted lacZ dicer.

### Example 8

### mdRNA Knockdown of Influenza Virus Titer

[0226] The activity of a dicer substrate nicked dsRNA in reducing influenza virus titer as compared to a wild-type dsRNA (i.e., not having a nick) was examined. The influenza dicer substrate sequence (25/27) is as follows:

| (SEQ ID NO: 62) | |
|---|---|
| Sense | 5′-GGAUCUUAUUUCUUCGGAGACAAdTdG |
| (SEQ ID NO: 11) | |
| Antisense | 5′-CAUUGUCUCCGAAGAAAUAAGAUCCUU |

The mdRNA sequences have a nicked sense strand after position 12, 13, and 14, respectively, as counted from the 5′-end, and the G at position 2 is substituted with locked nucleic acid G.

[0227] For the viral infectivity assay, Vero cells were seeded at 6.5×10⁴ cells/well the day before transfection in 500 μl 10% FBS/DMEM media per well. Samples of 100, 10, 1, 0.1, and 0.01 nM stock of each dsRNA were complexed with 1.0 μl (1 mg/ml stock) of Lipofectamine™ 2000 (Invitrogen, Carlsbad, Calif.) and incubated for 20 minutes at room temperature in 150 μl OPTIMEM (total volume) (Gibco, Carlsbad, Calif.). Vero cells were washed with OPTIMEM, and 150 μl of the transfection complex in OPTIMEM was then added to each well containing 150 μl of OPTIMEM media. Triplicate wells were tested for each condition. An additional control well with no transfection condition was prepared. Three hours post transfection, the media was removed. Each well was washed once with 200 μl PBS containing 0.3% BSA and 10 mM HEPES/PS. Cells in each well were infected with WSN strain of influenza virus at an MOI 0.01 in 200 μl of infection media containing 0.3% BSA/10 mM HEPES/PS and 4 μg/ml trypsin. The plate was incubated for 1 hour at 37° C. Unadsorbed virus was washed off with the 200 μl of infection media and discarded, then 400 μl DMEM containing 0.3% BSA/10 mM HEPES/PS and 4 μg/ml trypsin was added to each well. The plate was incubated at 37° C., 5% CO₂ for 48 hours, then 50 μl supernatant from each well was tested in duplicate by TCID₅₀ assays (50% Tissue-Culture Infective Dose, WHO protocol) in MDCK cells and titers were estimated using the Spearman and Karber formula. The results show that these mdRNAs show about a 50% to 60% viral titer knockdown, even at a concentration as low as 10 pM (FIG. 11).

[0228] An in vivo influenza mouse model was also used to examine the activity of a dicer substrate nicked dsRNA in reducing influenza virus titer as compared to a wild-type dsRNA (i.e., not having a nick). Female BALB/c mice (age 8-10 weeks with 5-10 mice per group) were dosed intranasally with 120 nmol/kg/day dsRNA (formulated in C12-norArg(NH₃+Cl⁻)-C12/DSPE-PEG2000/DSPC/cholesterol at a ratio of 30:1:20:49) for three consecutive days before intranasal challenge with influenza strain PR8 (20 PFU/mouse). Two days after infection, whole lungs are harvested from each mouse and placed in a solution of PBS/0.3% BSA with antibiotics, homogenize, and measure the viral titer (TCID₅₀). Doses were well tolerated by the mice, indicated by less than 2% body weight reduction in any of the dose groups. The mdRNAs tested exhibit similar, if not slightly greater, virus reduction in vivo as compared to unmodified and unnicked G1498 dicer substrate (see FIG. 12). Hence, mdRNA are active in vivo.

### Example 9

### Effect of mdRNA on Cytokine Induction

[0229] The effect of the mdRNA structure on cytokine induction in vivo was examined. Female BALB/c mice (age 7-9 weeks) were dosed intranasally with about 50 μM dsRNA (formulated in C12-norArg(NH₃+Cl-)-C12/DSPE-PEG2000/DSPC/cholesterol at a ratio of 30:1:20:49) or with 605 nmol/kg/day naked dsRNA for three consecutive days. About four hours after the final dose is administered, the mice were sacrificed to collect bronchoalveolar fluid (BALF), and collected blood is processed to serum for evaluation of the cytokine response. Bronchial lavage was performed with 0.5 mL ice-cold 0.3% BSA in saline two times for a total of 1 mL. BALF was spun and supernatants collected and frozen until cytokine analysis. Blood was collected from the vena cava immediately following euthanasia, placed into serum separator tubes, and allowed to clot at room temperature for at least 20 minutes. The samples were processed to serum, aliquoted into Millipore ULTRAFREE 0.22 μm filter tubes, spun at 12,000 rpm, frozen on dry ice, and then stored at −70° C. until analysis. Cytokine analysis of BALF and plasma were performed using the Procarta™ mouse 10-Plex Cytokine Assay Kit (Panomics, Fremont, Calif.) on a Bio-Plex™ array reader. Toxicity parameters were also measured, including body weights, prior to the first dose on day 0 and again on day 3 (just prior to euthanasia). Spleens were harvested and weighed (normalized to final body weight). The results are provided in Table 5.

TABLE 5
In vivo Cytokine Induction by Naked mdRNA

| | | | G1498:Nkd | | G1498:DSNkd | G1498:DSNkd | G1498:DSNkd |
|---|---|---|---|---|---|---|---|
| Cytokine | | G1498 | 11-1 | G1498:DS | 12-1 | 13-1 | 14-1 |
| IL-6 | Conc | 90.68 | 10.07 | 77.35 | 17.17 | 18.21 | 38.59 |
| | (pg/mL) | | | | | | |
| | Fold decrease | — | 9 | — | 5 | 4 | 2 |
| IL-12 | Conc | 661.48 | 20.32 | 1403.61 | 25.07 | 37.70 | 57.02 |
| (p40) | (pg/mL) | | | | | | |
| | Fold decrease | — | 33 | — | 56 | 37 | 25 |
| TNFα | Conc | 264.49 | 25.59 | 112.95 | 20.52 | 29.00 | 64.93 |
| | (pg/mL) | | | | | | |
| | Fold decrease | — | 10 | — | 6 | 4 | 2 |

[0230] The mdRNA (RISC or dicer sized) induced cytokines to lesser extent than the intact (i.e., not nicked) parent molecules. The decrease in cytokine induction was greatest when looking at IL-12(p40), the cytokine with consistently the highest levels of induction of the 10 cytokine multiplex assay. For the mdRNA, the decrease in IL-12 (p40) ranges from 25- to 56-fold, while the reduction in either IL-6 or TNFα induction was more modest (the decrease in these two cytokines ranges from 2- to 10-fold). Thus, the mdRNA structure appears to provide an advantage in vivo in that cytokine induction is minimized compared to unmodified dsRNA.

[0231] Similar results were obtained with the formulated mdRNA, although the reduction in induction was not as prominent. In addition, the presence or absence of a locked nucleic acid has no effect on cytokine induction. These results are shown in Table 6.

TABLE 6
In vivo Cytokine Induction by Formulated mdRNA

| | | | G1498:DSNkd | G1498:Nkd | G1498:DSNkd | G1498:DSNkd |
|---|---|---|---|---|---|---|
| Cytokine | | G1498:DS | 12-1 | 13-1 | 14-1 | 13 |
| IL-6 | Conc | 29.04 | 52.95 | 10.28 | 7.79 | 44.29 |
| | (pg/mL) | | | | | |
| | Fold decrease | — | −1.8 | 3 | 4 | −1.5 |
| IL-12 | Conc | 298.93 | 604.24 | 136.45 | 126.71 | 551.49 |
| (p40) | (pg/mL) | | | | | |
| | Fold decrease | — | 0 | 2 | 2 | 1 |
| TNFα | Conc | 13.49 | 21.35 | 3.15 | 3.15 | 18.69 |
| | (pg/mL) | | | | | |
| | Fold decrease | — | −1.6 | 4 | 4 | 1.4 |

### Example 10

### Survivin (BIRC5) siRNA

[0232] The knockdown activity of the siRNA shown in Table 7 below were examined in two different bladder cancer cells lines, UM-UC-3 cells and T24 cells.

TABLE 7
Survivin siRNA Nucleotide Sequences

| | Sequence (Sense) | Sequence (Antisense) |
|---|---|---|
| siRNA | 5′ to 3′ | 5′ to 3′ |
| Survivin-1 | ACCCGUUGGCAGAGGUGGCGGCGGC | GCCGCCGCCACCUCUGCCAACGGGUCC |
| | (SEQ ID NO: 1854) | (SEQ ID NO: 1875) |
| Survivin-2 | GCCUGGCAGCCCUUUCUCAAGGACC | GGUCCUUGAGAAAGGGCUGCCAGGCAG |
| | (SEQ ID NO: 1855) | (SEQ ID NO: 1876) |
| Survivin-3 | CUCAAGGACCACCGCAUCUCUACAU | AUGUAGAGAUGCGGUGGUCCUUGAGAA |
| | (SEQ ID NO: 1856) | (SEQ ID NO: 1877) |
| Survivin-4 | ACCGCAUCUCUACAUUCAAGAACUG | CAGUUCUUGAAUGUAGAGAUGCGGUGG |
| | (SEQ ID NO: 1857) | (SEQ ID NO: 1878) |
| Survivin-5 | ACAUUCAAGAACUGGCCCUUCUUGG | CCAAGAAGGGCCAGUUCUUGAAUGUAG |
| | (SEQ ID NO: 1858) | (SEQ ID NO: 1879) |
| Survivin-6 | CAUUCAAGAACUGGCCCUUCUUGGA | UCCAAGAAGGGCCAGUUCUUGAAUGUA |
| | (SEQ ID NO: 1859) | (SEQ ID NO: 1880) |
| Survivin-7 | AUUCAAGAACUGGCCCUUCUUGGAG | CUCCAAGAAGGGCCAGUUCUUGAAUGU |
| | (SEQ ID NO: 1860) | (SEQ ID NO: 1881) |
| Survivin-8 | AACUGGCCCUUCUUGGAGGGCUGCG | CGCAGCCCUCCAAGAAGGGCCAGUUCU |
| | (SEQ ID NO: 1861) | (SEQ ID NO: 1882) |
| Survivin-9 | AGCCAGACUUGGCCCAGUGUUUCUU | AAGAAACACUGGGCCAAGUCUGGCUCG |
| | (SEQ ID NO: 1862) | (SEQ ID NO: 1883) |
| Survivin-10 | CCCAGUGUUUCUUCUGCUUCAAGGA | UCCUUGAAGCAGAAGAAACACUGGGCC |
| | (SEQ ID NO: 1863) | (SEQ ID NO: 1884) |
| Survivin-11 | CCAGUGUUUCUUCUGCUUCAAGGAG | CUCCUUGAAGCAGAAGAAACACUGGGC |
| | (SEQ ID NO: 1864) | (SEQ ID NO: 1885) |
| Survivin-12 | UUCUUCUGCUUCAAGGAGCUGGAAG | CUUCCAGCUCCUUGAAGCAGAAGAAAC |
| | (SEQ ID NO: 1865) | (SEQ ID NO: 1886) |
| Survivin-13 | AAGGAGCUGGAAGGCUGGGAGCCAG | CUGGCUCCCAGCCUUCCAGCUCCUUGA |
| | (SEQ ID NO: 1866) | (SEQ ID NO: 1887) |
| Survivin-14 | AGGAGCUGGAAGGCUGGGAGCCAGA | UCUGGCUCCCAGCCUUCCAGCUCCUUG |
| | (SEQ ID NO: 1867) | (SEQ ID NO: 1888) |
| Survivin-15 | AAAGAAUUUGAGGAAACUGCGGAGA | UCUCCGCAGUUUCCUCAAAUUCUUUCU |
| | (SEQ ID NO: 1868) | (SEQ ID NO: 1889) |
| Survivin-16 | CCAUCGAGCAGCUGGCUGCCAUGGA | UCCAUGGCAGCCAGCUGCUCGAUGGCA |
| | (SEQ ID NO: 1869) | (SEQ ID NO: 1890) |
| Survivin-17 | CAUCGAGCAGCUGGCUGCCAUGGAU | AUCCAUGGCAGCCAGCUGCUCGAUGGC |
| | (SEQ ID NO: 1870) | (SEQ ID NO: 1891) |
| Survivin-18 | AUCGAGCAGCUGGCUGCCAUGGAUU | AAUCCAUGGCAGCCAGCUGCUCGAUGG |
| | (SEQ ID NO: 1871) | (SEQ ID NO: 1892) |
| Survivin-19 | UCCCUGGUGCCACCAGCCUUCCUGU | ACAGGAAGGCUGGUGGCACCAGGGAAU |
| | (SEQ ID NO: 1872) | (SEQ ID NO: 1893) |
| Survivin-20 | AGUGGCACCAGAGGUGCUUCUGCCU | AGGCAGAAGCACCUCUGGUGCCACUUU |
| | (SEQ ID NO: 1873) | (SEQ ID NO: 1894) |
| Survivin-21 | GCAUUCGUCCGGUUGCGCUdTdT | AGCGCAACCGGACGAAUGCdTdT |
| | (SEQ ID NO: 1874) | (SEQ ID NO: 1895) |

[0233] Briefly, each cell line was plated at a density of 7,500 cells/well on a 96-well plate. Twenty-fours later, a 25 μL mixture containing 25 nM siRNA and RNAi MAX diluted 1/50 in optiMEM media was added to each well containing 75 μL cell medium with 10% fetal bovine serum. The transfection mixture was incubated with the cells for 24 hours. Following the incubation, cells were lysed, RNA extracted and qRT-PCR was performed. The Qneg siRNA served as the negative control.

[0234] The following results were obtained as shown in Table 8.

TABLE 8
Survivin Specific siRNA Knockdown in Two Different Cell Lines

| | | % Knockdown vs. Qneg | | | |
|---|---|---|---|---|---|
| | | UM-UC-3 Cell Line | | T24 Cell Line | |
| | | Survivin | Survivin | Survivin | Survivin |
| siRNA | Position | (A) | (B) | (A) | (B) |
| Survivin-1 | 94 | 62 | 55 | 44 | 53 |
| Survivin-2 | 146 | 92 | 91 | 86 | 87 |
| Survivin-3 | 161 | 65 | 78 | 28 | 64 |
| Survivin-4 | 171 | 95 | 96 | 93 | 98 |
| Survivin-5 | 182 | 72 | 85 | 62 | 82 |
| Survivin-6 | 183 | 75 | 88 | 68 | 82 |
| Survivin-7 | 184 | 76 | 80 | 66 | 71 |
| Survivin-8 | 191 | 7 | 3 | 29 | 50 |
| Survivin-9 | 273 | 94 | 84 | 87 | 83 |
| Survivin-10 | 285 | 95 | 93 | 93 | 92 |
| Survivin-11 | 286 | 98 | 95 | 95 | 94 |
| Survivin-12 | 293 | 37 | 74 | 40 | 65 |
| Survivin-13 | 305 | 56 | 83 | 25 | 69 |
| Survivin-14 | 306 | 80 | 90 | 68 | 83 |
| Survivin-15 | 554 | 74 | 88 | 66 | 80 |
| Survivin-16 | 591 | 1 | 0 | 0 | 32 |
| Survivin-17 | 592 | 93 | 86 | 91 | 86 |
| Survivin-18 | 593 | 96 | 91 | 91 | 88 |
| Survivin-19 | 676 | 92 | 81 | 87 | 78 |
| Survivin-20 | 782 | 75 | 88 | 88 | 90 |
| Survivin-21 | 427 | 83 | 82 | 72 | 82 |
| | (RISC) | | | | |

[0235] The results show that the Survivin siRNA knockdown Survivin gene expression in the two bladder cancer cell lines. Four of 20 siRNAs showed greater than 90% KD at 25 nM in both cell lines relative to the Qneg negative control siRNA, and both primer/probe sets. Six of the siRNAs showed 75-90% KD relative to the Qneg negative control siRNA, and five siRNAs showed 70-85% KD relative to the Qneg negative control siRNA. Results are in agreement in both cell lines using both amplicons (i.e., “Survivin (A)” and “Survivin (B)”).

[0236] The knockdown activity of select Survivin siRNA at a concentration range of 0.0015 nM to 100 nM was measured in UM-UC 3 cells. The percent knockdown of the Survivin mRNA target relatiave to the Qneg siRNA and the IC₅₀ for each siRNA is shown in Table 9.

TABLE 9

| | | siRNA | | | | | |
|---|---|---|---|---|---|---|---|
| siRNA | | Percent Survivin mRNA Reduction vs. Qneg | | | | | |
| Concen- | | Survi- | Survi- | Survi- | Survi- | Survi- | Survi- |
| tration | | vin-2 | vin-4 | vin-10 | vin-11 | vin-18 | vin-20 |
| 100 | nM | 82% | 91% | 96% | 96% | 87% | 85% |
| 25 | nM | 87% | 90% | 95% | 95% | 88% | 87% |
| 6.25 | nM | 85% | 91% | 94% | 97% | 85% | 81% |
| 1.5625 | nM | 85% | 92% | 93% | 95% | 85% | 87% |
| 0.3906 | nM | 72% | 88% | 94% | 95% | 78% | 77% |
| 0.0977 | nM | 48% | 85% | 90% | 92% | 72% | 57% |
| 0.0244 | nM | 32% | 69% | 68% | 78% | 45% | 44% |
| 0.0061 | nM | 5% | 17% | 14% | 37% | −3% | 0% |
| 0.0015 | nM | 0% | 1% | 14% | 23% | 4% | 0% |
| IC50 | (pM) | 64% | 13% | 18% | 13% | 23% | 25% |

[0237] The results show that the 1050 values for each of the Survivin siRNA are less than 100 pM, ranging fron 13 to 64 pM, with three of the siRNAs showing values less than 20 pM. Little to no toxicity was observed with the selected siRNA at a concentration of 25 nM or lower.

### Example 10

### Survivin (BIRC5) siRNA Induce Caspase Activation

[0238] Induction of caspase activity and cell death by transfection of Survivin siRNA in a KU-7 bladder cancer cell line was examined.

[0239] Both Caspase 3 and 7 are effector caspases that mediate programmed cell death (i.e., apoptosis), which plays an important role in preventing cancer. Therefore, the ability of a drug, for example an siRNA, to induce the activity of caspases in a cancer or pre-cancer cell and consequently induce apoptosis to prevent cancer or treat cancer in a human subject is highly advantageous. In this Example, Survivin siRNA transfected into a bladder cancer cell line induced Caspase 3 and Caspase 7 activity, and further induced cell morphology changes observed via microscopy analysis that were highly indicative of apopotsis. Accordingly, the data indicate that Survivin siRNA may induce apoptosis in bladder cancer cells.

[0240] Briefly, KU-7 cells were plated at a density of 7,500 cells/well on a 96-well plate. Twenty-fours later, 25 μL mixture containing 25 nM or 5 nM siRNA and RNAi MAX diluted 1/50 in optiMEM media was added to each well containing 75 μL cell medium with 10% fetal bovine serum. The transfection was performed in triplacate. The transfection mixture was incubated with the cells for 24 hours. Following the incubation, cells were lysed, RNA extracted and qRT-PCR was performed to determine gene expression levels. The Qneg siRNA served as the negative control. Separately, the transfected cells of the duplicate plate were lysed, and CASPASE-GLO reagent was added (PROMEGA) to measure caspase activity per the manufacturer's protocol. Caspase activity was measured with a Wallac Plate reader. Cell viability was measured with the CELLTITER 96 assay kit (PROMEGA) per the manufacturer's protocol.

[0241] The sequence specific Survivin siRNA and a negative control siRNA (i.e., a scrambled sequence of a Survivin siRNA) used in this Example are shown below. Knockdown activity in transfected and untransfected cells was normalized to a Qneg control dsRNA (QIAGEN) and presented as a normalized value of the Qneg control (i.e., Qneg represented 100% or “normal” gene expression levels).

Survivin-11 (DX9792):
(SEQ ID NO: 1896)

| | |
|---|---|
| Sense Strand: | 5′-CCAGUGUUUCUUCUGCUUCTT-3′ |

(SEQ ID NO: 1897)

| | |
|---|---|
| Antisense Strand: | 5′-GAAGCAGAAGAAACACUGGTT-3′ |

Survivin-11UNA (DX9794):
(SEQ ID NO: 1898)

| | |
|---|---|
| Sense Strand: | 5′-CCAGUGUUUCUUCUGCUUCunaUunaU-3′ |

(SEQ ID NO: 1899)

| | |
|---|---|
| Antisense Strand: | 5′-GAAGCAGAAGAAACACUGGunaUunaU-3′ |

Survivin-11UNA-SCR (DX9794)-negative control:
(SEQ ID NO: 1900)

| | |
|---|---|
| Sense Strand: | 5′-UCCCGUUCUAGUGUUUCCUunaUunaU-3′ |

(SEQ ID NO: 1901)

| | |
|---|---|
| Antisense Strand: | 5′-AGGAAACACUAGAACGGGAunaUunaU-3′ |

[0242] Hydroxymethyl substituted monomer(s) in the sequences of the table below are identified as “unaX” where X is the one letter code for the nucleomonomer (e.g., “unaU” indicates that the uracil comprises a hydroxymethyl substituted monomer). In this Example, the Survivin:286UNA siRNA is a double-stranded RNA having a 19 base pair region with two blunt ends and two hydroxymethyl substituted monomers were covalently linked to the 3′-end of both the sense strand and the antisense strand.

[0243] The results for the percent survivin gene knockdown, percent cell death induction, and the fold caspase induction are shown below in Table 10. The percent knockdown (% KD) is relative to Qneg siRNA, percent cell death induction (% CD) is relative to untransfected cells; and fold caspase induction (Ca) is also relative to untransfected cells.

TABLE 10

| | siRNA | KU-7 Cells | | |
|---|---|---|---|---|
| siRNA Identifier | Conc. | % KD | % CD | Ca |
| Survivin-11 | 25 nM | 80 | 19 | 7.1 |
| (DX9792) | 5 nM | 85 | 17 | 5.2 |
| Survivin-11UNA | 25 nM | 79 | 23 | 6.6 |
| (DX9794) | 5 nM | 84 | 23 | 5.2 |
| Survivin-11UNA- | 25 nM | 0 | 9 | 1 |
| SCR (DX9794) | 5 nM | 15 | 8 | 1.1 |

[0244] The results show that Survivin siRNA reducted target gene expression levels relative to the Qneg siRNA negative control in the KU-7 bladder cancer cell line. Further, Survivin siRNA induced over a five-fold increase in caspase activity relative to untransfected cells. Lastly, these results show that there is a correlation between siRNA mediated knockdown of Survivin gene expression and both cell death induction and caspase activity induction. In other words, upon a reduction in Survivin gene expression mediated by the Survivin siRNA, both caspase activity increases and cell death induction increases.

### Example 11

### Survivin (BIRC5) siRNA Reduced Tumor Growth in Mice

[0245] The effect of Survivin siRNA on tumor growth in an orthotopic bladder cancer mouse model was examined.

[0246] For each of the three treatment groups, twelve eight-week old female athymic nude mice were anaesthetized with 1.75% isoflurane prior to the implantation of KU-7-LUC cells (Human baldder cancer cells constituitvely expressing luciferase). A superficial 4/0 silk purse-string suture was placed around the urethral meatus before a lubricated catheter was inserted through the urethra into the bladder. The bladder was washed once with PBS prior to instilling approximately two million KU-7-LUC cells in 50 μL volume into the bladder. A suture was used to occlude the urethra for 2 hours.

[0247] The KU-7-LUC orthotopic bladder cancer bearing mice were treated with unmodified and modified Survivin RISC siRNAs or a control siRNA (G1498-DX3838). Each mouse was dosed with 0.5 mg/kg of siRNA and a liposomal delivery formulation (C18:1-norArg-C16/CHEMS/CHOL/DMPE-PEG2K (50:32:16:2); N/P 1.8) at a total volume of 50 μL, three times a day, twice weekly on days 2, 4, 7 and 10 post tumor inocculation. Each mouse was dosed with the siRNA and delivery formulation by catheter directly to the bladder.

[0248] Tumor progression was assessed by an intraperitoneal injection of 150 mg/kg luciferin post anesthesia in the supine position followed by image acquisition by an IVIS (inv vivo imaging system) 200 system (XENOGEN). Tumor size for each mouse was determined by quantifying bioluminescence (i.e., photons/second) and directly correlating the degree of bioluminescity with tumor size (i.e., greater intensity indicates the presence of a larger tumor).

[0249] Bladder tumor size and Survivin gene expression levels after dosing with siRNAs was examined.

[0250] Survivin specific siRNAs, Survivin-11(DX9792) and Survivin-11UNA(DX9794) described above, and the negative control siRNA G1498-DX3838 were dosed. The sequence of G1498-DX3838 is as follows:

Sense Strand:
(SEQ ID NO: 1902)
5′-mGmGAUCUUAUUUCUUCGGAGACAAdTdG-3′
Antisense Strand:
(SEQ ID NO: 1903)
5′-mCmAUUGUCUCCGAAGAAAUAAGAUCCUU-3′

[0251] The “m” preceding a nucleotide in the sequences above indicates the presence of a 2′-O-methyl modification to that nucleotide.

[0252] Four of the twelve mice for each treatment group were sacrificed two days post last dose for analysis of Survivin gene expression levels and RACE analysis. Survivin gene expression levels were normalized against GAPDH and PPIA. RACE analysis was performed to assay for the presence of the predicted cleavage product of the Survivin mRNA.

[0253] The percent reduction in Survivin mRNA expression levels in mice dosed with unmodified (Survivin286) Survivin siRNA, modified (Survivin286UNA) Survivin siRNA, and the negative control siRNA (G1498-DX3838) are shown below in Table 11.

TABLE 11

| | % Reduction in Survivin |
|---|---|
| siRNA Identifier | Gene Expression Levels |
| Survivin-11 (DX9792) | 60.8% |
| Survivin-11UNA (DX9794) | 85.1% |
| G1498-DX3838 | 0% |

The RACE analysis showed the predicted cleavage product indicating that the reduction of Survivin gene expression levels in the mouse is a result of RNAi degradation mediated by Survivin siRNA. Further, six of the eight mice dosed with Survivin-11 siRNA and five of the eight mice dosed with Survivin-11UNA siRNA had smaller tumors compared to mice dosed with the control siRNA, indicating that miced dosed with Survivin siRNA had a decreased tumor growth rate compared to mice dosed with the control siRNA.

The application's sequence listing, which the Patent Office published only in electronic form, follows.

SEQUENCE LISTING (1903 sequences)

SEQ ID NO: 1 - DNA, 21 bp, Artificial Sequence
  source: /note="Description of Artificial Sequence: Synthetic oligonucleotide"
  source: /note="Description of Combined DNA/RNA Molecule: Synthetic oligonucleotide"
cuacacaaaucagcgauuutt

SEQ ID NO: 2 - DNA, 21 bp, Artificial Sequence
  source: /note="Description of Artificial Sequence: Synthetic oligonucleotide"
  source: /note="Description of Combined DNA/RNA Molecule: Synthetic oligonucleotide"
aaaucgcugauuuguguagtt

SEQ ID NO: 3 - DNA, 25 bp, Artificial Sequence
  source: /note="Description of Artificial Sequence: Synthetic oligonucleotide"
  source: /note="Description of Combined DNA/RNA Molecule: Synthetic oligonucleotide"
cuacacaaaucagcgauuuccaugt

SEQ ID NO: 4 - RNA, 27 nt, Artificial Sequence
  source: /note="Description of Artificial Sequence: Synthetic oligonucleotide"
acauggaaaucgcugauuuguguaguc

SEQ ID NO: 5 - RNA, 13 nt, Artificial Sequence
  source: /note="Description of Artificial Sequence: Synthetic oligonucleotide"
cuacacaaaucag

SEQ ID NO: 6 - DNA, 11 bp, Artificial Sequence
  source: /note="Description of Artificial Sequence: Synthetic oligonucleotide"
  source: /note="Description of Combined DNA/RNA Molecule: Synthetic oligonucleotide"
gauuuccaugt

SEQ ID NO: 7 - DNA, 21 bp, Artificial Sequence
  source: /note="Description of Artificial Sequence: Synthetic oligonucleotide"
  source: /note="Description of Combined DNA/RNA Molecule: Synthetic oligonucleotide"
ggaucuuauuucuucggagtt

SEQ ID NO: 8 - DNA, 21 bp, Artificial Sequence
  source: /note="Description of Artificial Sequence: Synthetic oligonucleotide"
  source: /note="Description of Combined DNA/RNA Molecule: Synthetic oligonucleotide"
cuccgaagaaauaagaucctt

SEQ ID NO: 9 - RNA, 11 nt, Artificial Sequence
  source: /note="Description of Artificial Sequence: Synthetic oligonucleotide"
ggaucuuauuu

SEQ ID NO: 10 - DNA, 10 bp, Artificial Sequence
  source: /note="Description of Artificial Sequence: Synthetic oligonucleotide"
  source: /note="Description of Combined DNA/RNA Molecule: Synthetic oligonucleotide"
cuucggagtt

SEQ ID NO: 11 - RNA, 27 nt, Artificial Sequence
  source: /note="Description of Artificial Sequence: Synthetic oligonucleotide"
cauugucuccgaagaaauaagauccuu

SEQ ID NO: 12 - RNA, 8 nt, Artificial Sequence
  source: /note="Description of Artificial Sequence: Synthetic oligonucleotide"
ggaucuua

SEQ ID NO: 13 - DNA, 17 bp, Artificial Sequence
  source: /note="Description of Artificial Sequence: Synthetic oligonucleotide"
  source: /note="Description of Combined DNA/RNA Molecule: Synthetic oligonucleotide"
uuucuucggagacaatg

SEQ ID NO: 14 - DNA, 16 bp, Artificial Sequence
  source: /note="Description of Artificial Sequence: Synthetic oligonucleotide"
  source: /note="Description of Combined DNA/RNA Molecule: Synthetic oligonucleotide"
uucuucggagacaatg

SEQ ID NO: 15 - DNA, 15 bp, Artificial Sequence
  source: /note="Description of Artificial Sequence: Synthetic oligonucleotide"
  source: /note="Description of Combined DNA/RNA Molecule: Synthetic oligonucleotide"
ucuucggagacaatg

SEQ ID NO: 16 - DNA, 14 bp, Artificial Sequence
  source: /note="Description of Artificial Sequence: Synthetic oligonucleotide"
  source: /note="Description of Combined DNA/RNA Molecule: Synthetic oligonucleotide"
cuucggagacaatg

SEQ ID NO: 17 - DNA, 13 bp, Artificial Sequence
  source: /note="Description of Artificial Sequence: Synthetic oligonucleotide"
  source: /note="Description of Combined DNA/RNA Molecule: Synthetic oligonucleotide"
uucggagacaatg

SEQ ID NO: 18 - DNA, 12 bp, Artificial Sequence
  source: /note="Description of Artificial Sequence: Synthetic oligonucleotide"
  source: /note="Description of Combined DNA/RNA Molecule: Synthetic oligonucleotide"
ucggagacaatg

SEQ ID NO: 19 - DNA, 11 bp, Artificial Sequence
  source: /note="Description of Artificial Sequence: Synthetic oligonucleotide"
  source: /note="Description of Combined DNA/RNA Molecule: Synthetic oligonucleotide"
cggagacaatg

SEQ ID NO: 20 - RNA, 9 nt, Artificial Sequence
  source: /note="Description of Artificial Sequence: Synthetic oligonucleotide"
ggaucuuau

SEQ ID NO: 21 - RNA, 10 nt, Artificial Sequence
  source: /note="Description of Artificial Sequence: Synthetic oligonucleotide"
ggaucuuauu

SEQ ID NO: 22 - RNA, 11 nt, Artificial Sequence
  source: /note="Description of Artificial Sequence: Synthetic oligonucleotide"
ggaucuuauuu

SEQ ID NO: 23 - RNA, 12 nt, Artificial Sequence
  source: /note="Description of Artificial Sequence: Synthetic oligonucleotide"
ggaucuuauuuc

SEQ ID NO: 24 - RNA, 8 nt, Artificial Sequence
  source: /note="Description of Artificial Sequence: Synthetic oligonucleotide"
cuacacaa

SEQ ID NO: 25 - DNA, 13 bp, Artificial Sequence
  source: /note="Description of Artificial Sequence: Synthetic oligonucleotide"
  source: /note="Description of Combined DNA/RNA Molecule: Synthetic oligonucleotide"
aucagcgauuutt

SEQ ID NO: 26 - DNA, 12 bp, Artificial Sequence
  source: /note="Description of Artificial Sequence: Synthetic oligonucleotide"
  source: /note="Description of Combined DNA/RNA Molecule: Synthetic oligonucleotide"
ucagcgauuutt

SEQ ID NO: 27 - DNA, 11 bp, Artificial Sequence
  source: /note="Description of Artificial Sequence: Synthetic oligonucleotide"
  source: /note="Description of Combined DNA/RNA Molecule: Synthetic oligonucleotide"
cagcgauuutt

SEQ ID NO: 28 - DNA, 10 bp, Artificial Sequence
  source: /note="Description of Artificial Sequence: Synthetic oligonucleotide"
  source: /note="Description of Combined DNA/RNA Molecule: Synthetic oligonucleotide"
agcgauuutt

SEQ ID NO: 29 - DNA, 9 bp, Artificial Sequence
  source: /note="Description of Artificial Sequence: Synthetic oligonucleotide"
  source: /note="Description of Combined DNA/RNA Molecule: Synthetic oligonucleotide"
gcgauuutt

SEQ ID NO: 30 - DNA, 8 bp, Artificial Sequence
  source: /note="Description of Artificial Sequence: Synthetic oligonucleotide"
  source: /note="Description of Combined DNA/RNA Molecule: Synthetic oligonucleotide"
cgauuutt

SEQ ID NO: 31 - DNA, 7 bp, Artificial Sequence
  source: /note="Description of Artificial Sequence: Synthetic oligonucleotide"
  source: /note="Description of Combined DNA/RNA Molecule: Synthetic oligonucleotide"
gauuutt

SEQ ID NO: 32 - RNA, 9 nt, Artificial Sequence
  source: /note="Description of Artificial Sequence: Synthetic oligonucleotide"
cuacacaaa

SEQ ID NO: 33 - RNA, 10 nt, Artificial Sequence
  source: /note="Description of Artificial Sequence: Synthetic oligonucleotide"
cuacacaaau

SEQ ID NO: 34 - RNA, 11 nt, Artificial Sequence
  source: /note="Description of Artificial Sequence: Synthetic oligonucleotide"
cuacacaaauc

SEQ ID NO: 35 - RNA, 12 nt, Artificial Sequence
  source: /note="Description of Artificial Sequence: Synthetic oligonucleotide"
cuacacaaauca

SEQ ID NO: 36 - RNA, 13 nt, Artificial Sequence
  source: /note="Description of Artificial Sequence: Synthetic oligonucleotide"
cuacacaaaucag

SEQ ID NO: 37 - RNA, 14 nt, Artificial Sequence
  source: /note="Description of Artificial Sequence: Synthetic oligonucleotide"
cuacacaaaucagc

SEQ ID NO: 38 - RNA, 13 nt, Artificial Sequence
  source: /note="Description of Artificial Sequence: Synthetic oligonucleotide"
ggaucuuauuucu

SEQ ID NO: 39 - RNA, 14 nt, Artificial Sequence
  source: /note="Description of Artificial Sequence: Synthetic oligonucleotide"
ggaucuuauuucuu

SEQ ID NO: 40 - RNA, 8 nt, Artificial Sequence
  source: /note="Description of Artificial Sequence: Synthetic oligonucleotide"
ggaucuua

SEQ ID NO: 41 - RNA, 9 nt, Artificial Sequence
  source: /note="Description of Artificial Sequence: Synthetic oligonucleotide"
ggaucuuau

SEQ ID NO: 42 - RNA, 10 nt, Artificial Sequence
  source: /note="Description of Artificial Sequence: Synthetic oligonucleotide"
ggaucuuauu

SEQ ID NO: 43 - RNA, 11 nt, Artificial Sequence
  source: /note="Description of Artificial Sequence: Synthetic oligonucleotide"
ggaucuuauuu

SEQ ID NO: 44 - RNA, 12 nt, Artificial Sequence
  source: /note="Description of Artificial Sequence: Synthetic oligonucleotide"
ggaucuuauuuc

SEQ ID NO: 45 - RNA, 13 nt, Artificial Sequence
  source: /note="Description of Artificial Sequence: Synthetic oligonucleotide"
ggaucuuauuucu

SEQ ID NO: 46 - RNA, 14 nt, Artificial Sequence
  source: /note="Description of Artificial Sequence: Synthetic oligonucleotide"
ggaucuuauuucuu

SEQ ID NO: 47 - DNA, 13 bp, Artificial Sequence
  source: /note="Description of Artificial Sequence: Synthetic oligonucleotide"
  source: /note="Description of Combined DNA/RNA Molecule: Synthetic oligonucleotide"
uuucuucggagtt

SEQ ID NO: 48 - DNA, 12 bp, Artificial Sequence
  source: /note="Description of Artificial Sequence: Synthetic oligonucleotide"
  source: /note="Description of Combined DNA/RNA Molecule: Synthetic oligonucleotide"
uucuucggagtt

SEQ ID NO: 49 - DNA, 11 bp, Artificial Sequence
  source: /note="Description of Artificial Sequence: Synthetic oligonucleotide"
  source: /note="Description of Combined DNA/RNA Molecule: Synthetic oligonucleotide"
ucuucggagtt

SEQ ID NO: 50 - DNA, 10 bp, Artificial Sequence
  source: /note="Description of Artificial Sequence: Synthetic oligonucleotide"
  source: /note="Description of Combined DNA/RNA Molecule: Synthetic oligonucleotide"
cuucggagtt

SEQ ID NO: 51 - DNA, 9 bp, Artificial Sequence
  source: /note="Description of Artificial Sequence: Synthetic oligonucleotide"
  source: /note="Description of Combined DNA/RNA Molecule: Synthetic oligonucleotide"
uucggagtt

SEQ ID NO: 52 - DNA, 8 bp, Artificial Sequence
  source: /note="Description of Artificial Sequence: Synthetic oligonucleotide"
  source: /note="Description of Combined DNA/RNA Molecule: Synthetic oligonucleotide"
ucggagtt

SEQ ID NO: 53 - DNA, 7 bp, Artificial Sequence
  source: /note="Description of Artificial Sequence: Synthetic oligonucleotide"
  source: /note="Description of Combined DNA/RNA Molecule: Synthetic oligonucleotide"
cggagtt

SEQ ID NO: 54 - DNA, 13 bp, Artificial Sequence
  source: /note="Description of Artificial Sequence: Synthetic oligonucleotide"
  source: /note="Description of Combined DNA/RNA Molecule: Synthetic oligonucleotide"
uuucuucggagtt

SEQ ID NO: 55 - DNA, 12 bp, Artificial Sequence
  source: /note="Description of Artificial Sequence: Synthetic oligonucleotide"
  source: /note="Description of Combined DNA/RNA Molecule: Synthetic oligonucleotide"
uucuucggagtt

SEQ ID NO: 56 - DNA, 11 bp, Artificial Sequence
  source: /note="Description of Artificial Sequence: Synthetic oligonucleotide"
  source: /note="Description of Combined DNA/RNA Molecule: Synthetic oligonucleotide"
ucuucggagtt

SEQ ID NO: 57 - DNA, 10 bp, Artificial Sequence
  source: /note="Description of Artificial Sequence: Synthetic oligonucleotide"
  source: /note="Description of Combined DNA/RNA Molecule: Synthetic oligonucleotide"
cuucggagtt

SEQ ID NO: 58 - DNA, 9 bp, Artificial Sequence
  source: /note="Description of Artificial Sequence: Synthetic oligonucleotide"
  source: /note="Description of Combined DNA/RNA Molecule: Synthetic oligonucleotide"
uucggagtt

SEQ ID NO: 59 - DNA, 8 bp, Artificial Sequence
  source: /note="Description of Artificial Sequence: Synthetic oligonucleotide"
  source: /note="Description of Combined DNA/RNA Molecule: Synthetic oligonucleotide"
ucggagtt

SEQ ID NO: 60 - DNA, 7 bp, Artificial Sequence
  source: /note="Description of Artificial Sequence: Synthetic oligonucleotide"
  source: /note="Description of Combined DNA/RNA Molecule: Synthetic oligonucleotide"
cggagtt

SEQ ID NO: 61 - DNA, 21 bp, Artificial Sequence
  source: /note="Description of Artificial Sequence: Synthetic oligonucleotide"
  source: /note="Description of Combined DNA/RNA Molecule: Synthetic oligonucleotide"
ggaucuuauuucuucggagtt

SEQ ID NO: 62 - DNA, 25 bp, Artificial Sequence
  source: /note="Description of Artificial Sequence: Synthetic oligonucleotide"
  source: /note="Description of Combined DNA/RNA Molecule: Synthetic oligonucleotide"
ggaucuuauuucuucggagacaatg

SEQ ID NO: 63 - RNA, 25 nt, Artificial Sequence
  source: /note="Description of Artificial Sequence: Synthetic oligonucleotide"
guauuuugaugaggaguucacggcc

SEQ ID NO: 64 - RNA, 25 nt, Artificial Sequence
  source: /note="Description of Artificial Sequence: Synthetic oligonucleotide"
ggcccagaugaucaccaucacacca

SEQ ID NO: 65 - RNA, 25 nt, Artificial Sequence
  source: /note="Description of Artificial Sequence: Synthetic oligonucleotide"
gggaagaaaacuauccugcggguuu

SEQ ID NO: 66 - RNA, 25 nt, Artificial Sequence
  source: /note="Description of Artificial Sequence: Synthetic oligonucleotide"
guuuuaauuuauuucauccaguuug

SEQ ID NO: 67 - RNA, 25 nt, Artificial Sequence
  source: /note="Description of Artificial Sequence: Synthetic oligonucleotide"
acguagggaaauguuaaggacuucu

SEQ ID NO: 68 - RNA, 25 nt, Artificial Sequence
  source: /note="Description of Artificial Sequence: Synthetic oligonucleotide"
ccaggguuuacccagugggacagag

SEQ ID NO: 69 - RNA, 25 nt, Artificial Sequence
  source: /note="Description of Artificial Sequence: Synthetic oligonucleotide"
agcaagguuuaaauuuguuauugug

SEQ ID NO: 70 - RNA, 25 nt, Artificial Sequence
  source: /note="Description of Artificial Sequence: Synthetic oligonucleotide"
uguauuauguuguucaaaugcauuu

SEQ ID NO: 71 - RNA, 25 nt, Artificial Sequence
  source: /note="Description of Artificial Sequence: Synthetic oligonucleotide"
uuuuaaucuuugugacaggaaagcc

SEQ ID NO: 72 - RNA, 25 nt, Artificial Sequence
  source: /note="Description of Artificial Sequence: Synthetic oligonucleotide"
uuaaucuuugugacaggaaagcccu

SEQ ID NO: 73 - RNA, 25 nt, Artificial Sequence
  source: /note="Description of Artificial Sequence: Synthetic oligonucleotide"
gcugcuuaugucucccagcauggcc

SEQ ID NO: 74 - RNA, 25 nt, Artificial Sequence
  source: /note="Description of Artificial Sequence: Synthetic oligonucleotide"
aaguguuucagaagcuucucccuga

SEQ ID NO: 75 - RNA, 25 nt, Artificial Sequence
  source: /note="Description of Artificial Sequence: Synthetic oligonucleotide"
gaccaucaauaaggaagaagcccuu

SEQ ID NO: 76 - RNA, 25 nt, Artificial Sequence
  source: /note="Description of Artificial Sequence: Synthetic oligonucleotide"
ccaucaauaaggaagaagcccuuca

SEQ ID NO: 77 - RNA, 25 nt, Artificial Sequence
  source: /note="Description of Artificial Sequence: Synthetic oligonucleotide"
ucaauaaggaagaagcccuucagcg

SEQ ID NO: 78 - RNA, 25 nt, Artificial Sequence
  source: /note="Description of Artificial Sequence: Synthetic oligonucleotide"
aauaaggaagaagcccuucagcggc

SEQ ID NO: 79 - RNA, 25 nt, Artificial Sequence
  source: /note="Description of Artificial Sequence: Synthetic oligonucleotide"
aggaagaagcccuucagcggccagu

SEQ ID NO: 80 - RNA, 25 nt, Artificial Sequence
  source: /note="Description of Artificial Sequence: Synthetic oligonucleotide"
gcauaacuaaaggugaaaagcuccg

SEQ ID NO: 81 - RNA, 25 nt, Artificial Sequence
  source: /note="Description of Artificial Sequence: Synthetic oligonucleotide"
cauaacuaaaggugaaaagcuccgg

SEQ ID NO: 82 - RNA, 25 nt, Artificial Sequence
  source: /note="Description of Artificial Sequence: Synthetic oligonucleotide"
cuacaucacgccagucaacagucug

SEQ ID NO: 83 - RNA, 25 nt, Artificial Sequence
  source: /note="Description of Artificial Sequence: Synthetic oligonucleotide"
acuggauuuaagcagaguucaaaag

SEQ ID NO: 84 - RNA, 25 nt, Artificial Sequence
  source: /note="Description of Artificial Sequence: Synthetic oligonucleotide"
cuggauuuaagcagaguucaaaagc

SEQ ID NO: 85 - RNA, 25 nt, Artificial Sequence
  source: /note="Description of Artificial Sequence: Synthetic oligonucleotide"
gauuuaagcagaguucaaaagcccu

SEQ ID NO: 86 - RNA, 25 nt, Artificial Sequence
  source: /note="Description of Artificial Sequence: Synthetic oligonucleotide"
auuuaagcagaguucaaaagcccuu

SEQ ID NO: 87 - RNA, 25 nt, Artificial Sequence
  source: /note="Description of Artificial Sequence: Synthetic oligonucleotide"
uuaagcagaguucaaaagcccuuca

SEQ ID NO: 88 - RNA, 25 nt, Artificial Sequence
  source: /note="Description of Artificial Sequence: Synthetic oligonucleotide"
uaagcagaguucaaaagcccuucag

SEQ ID NO: 89 - RNA, 25 nt, Artificial Sequence
  source: /note="Description of Artificial Sequence: Synthetic oligonucleotide"
agcagaguucaaaagcccuucagcg

SEQ ID NO: 90 - RNA, 25 nt, Artificial Sequence
  source: /note="Description of Artificial Sequence: Synthetic oligonucleotide"
cucagggucugagugaagccgcucg

SEQ ID NO: 91 - RNA, 25 nt, Artificial Sequence
  source: /note="Description of Artificial Sequence: Synthetic oligonucleotide"
caagcaacuacaucacgccagucaa

SEQ ID NO: 92 - RNA, 25 nt, Artificial Sequence
  source: /note="Description of Artificial Sequence: Synthetic oligonucleotide"
aucaauggcagcuucuuggugcgug

SEQ ID NO: 93 - RNA, 25 nt, Artificial Sequence
  source: /note="Description of Artificial Sequence: Synthetic oligonucleotide"
uuccagcccacauuggauucaucag

SEQ ID NO: 94 - RNA, 25 nt, Artificial Sequence
  source: /note="Description of Artificial Sequence: Synthetic oligonucleotide"
cagcugagaauguggaauaccuaag

SEQ ID NO: 95 - RNA, 25 nt, Artificial Sequence
  source: /note="Description of Artificial Sequence: Synthetic oligonucleotide"
aacguaucuccuaauuugaggcuca

SEQ ID NO: 96 - RNA, 25 nt, Artificial Sequence
  source: /note="Description of Artificial Sequence: Synthetic oligonucleotide"
ccuaaaauaauuucucuacaauugg

SEQ ID NO: 97 - RNA, 25 nt, Artificial Sequence
  source: /note="Description of Artificial Sequence: Synthetic oligonucleotide"
uggaagauucagcuaguuaggagcc

SEQ ID NO: 98 - RNA, 25 nt, Artificial Sequence
  source: /note="Description of Artificial Sequence: Synthetic oligonucleotide"
uuaaacucuccuagucaauauccac

SEQ ID NO: 99 - RNA, 25 nt, Artificial Sequence
  source: /note="Description of Artificial Sequence: Synthetic oligonucleotide"
cagccuacaguuauguucagucaca

SEQ ID NO: 100 - RNA, 25 nt, Artificial Sequence
  source: /note="Description of Artificial Sequence: Synthetic oligonucleotide"
guuauguucagucacacacacauac

SEQ ID NO: 101 - RNA, 25 nt, Artificial Sequence
  source: /note="Description of Artificial Sequence: Synthetic oligonucleotide"
cacauacaaaauguuccuuuugcuu

SEQ ID NO: 102 - RNA, 25 nt, Artificial Sequence
  source: /note="Description of Artificial Sequence: Synthetic oligonucleotide"
uccuuuugcuuuuaaaguaauuuuu

SEQ ID NO: 103 - RNA, 25 nt, Artificial Sequence
  source: /note="Description of Artificial Sequence: Synthetic oligonucleotide"
ugaccugugaagcaacagucaaugg

SEQ ID NO: 104 - RNA, 25 nt, Artificial Sequence
  source: /note="Description of Artificial Sequence: Synthetic oligonucleotide"
cuaucucacacaucgacaaaccaau

SEQ ID NO: 105 - RNA, 25 nt, Artificial Sequence
  source: /note="Description of Artificial Sequence: Synthetic oligonucleotide"
uguccucaauuguacugcuaccacu

SEQ ID NO: 106 - RNA, 25 nt, Artificial Sequence
  source: /note="Description of Artificial Sequence: Synthetic oligonucleotide"
aaaccguagcuggcaagcggucuua

SEQ ID NO: 107 - RNA, 25 nt, Artificial Sequence
  source: /note="Description of Artificial Sequence: Synthetic oligonucleotide"
uagcuggcaagcggucuuaccggcu

SEQ ID NO: 108 - RNA, 25 nt, Artificial Sequence
  source: /note="Description of Artificial Sequence: Synthetic oligonucleotide"
uuguaugguuaaaagauggguuacc

SEQ ID NO: 109 - RNA, 25 nt, Artificial Sequence
  source: /note="Description of Artificial Sequence: Synthetic oligonucleotide"
ugguuaaaagauggguuaccugcga

SEQ ID NO: 110 - RNA, 25 nt, Artificial Sequence
  source: /note="Description of Artificial Sequence: Synthetic oligonucleotide"
cagggaauuauacaaucuugcugag

SEQ ID NO: 111 - RNA, 25 nt, Artificial Sequence
  source: /note="Description of Artificial Sequence: Synthetic oligonucleotide"
acaaucuugcugagcauaaaacagu

SEQ ID NO: 112 - RNA, 25 nt, Artificial Sequence
  source: /note="Description of Artificial Sequence: Synthetic oligonucleotide"
ccaauaaugaagaguccuuuauccu

SEQ ID NO: 113 - RNA, 25 nt, Artificial Sequence
  source: /note="Description of Artificial Sequence: Synthetic oligonucleotide"
acuuuggauguuccaacgcaaguug

SEQ ID NO: 114 - RNA, 25 nt, Artificial Sequence
  source: /note="Description of Artificial Sequence: Synthetic oligonucleotide"
aaugcuuccacuaaacugaaaccau

SEQ ID NO: 115 - RNA, 25 nt, Artificial Sequence
  source: /note="Description of Artificial Sequence: Synthetic oligonucleotide"
gagaaaguuugacuuuguuaaauau

SEQ ID NO: 116 - RNA, 25 nt, Artificial Sequence
  source: /note="Description of Artificial Sequence: Synthetic oligonucleotide"
aaagaacuacuguauauuaaaaguu

SEQ ID NO: 117 - RNA, 25 nt, Artificial Sequence
  source: /note="Description of Artificial Sequence: Synthetic oligonucleotide"
uuagaaauacggguuuugacuuaac

SEQ ID NO: 118 - RNA, 25 nt, Artificial Sequence
  source: /note="Description of Artificial Sequence: Synthetic oligonucleotide"
aacauggguacagcaaacucagcac

SEQ ID NO: 119 - RNA, 25 nt, Artificial Sequence
  source: /note="Description of Artificial Sequence: Synthetic oligonucleotide"
aaagacacagaagaugcugaccuca

SEQ ID NO: 120 - RNA, 25 nt, Artificial Sequence
  source: /note="Description of Artificial Sequence: Synthetic oligonucleotide"
uaguagggagguuuauucagaucgc

SEQ ID NO: 121 - RNA, 25 nt, Artificial Sequence
  source: /note="Description of Artificial Sequence: Synthetic oligonucleotide"
gccuucugcagcaggguucugggau

SEQ ID NO: 122 - RNA, 25 nt, Artificial Sequence
  source: /note="Description of Artificial Sequence: Synthetic oligonucleotide"
ggucugguacauauuggaaauuaug

SEQ ID NO: 123 - RNA, 25 nt, Artificial Sequence
  source: /note="Description of Artificial Sequence: Synthetic oligonucleotide"
cuaguccuuccgauggaagcacuag

SEQ ID NO: 124 - RNA, 25 nt, Artificial Sequence
  source: /note="Description of Artificial Sequence: Synthetic oligonucleotide"
ccagugaauauuguuuuuaugugga

SEQ ID NO: 125 - RNA, 25 nt, Artificial Sequence
  source: /note="Description of Artificial Sequence: Synthetic oligonucleotide"
augaauucaaguuggaauugguaga

SEQ ID NO: 126 - RNA, 25 nt, Artificial Sequence
  source: /note="Description of Artificial Sequence: Synthetic oligonucleotide"
caggacacagauuuagacuuggaga

SEQ ID NO: 127 - RNA, 25 nt, Artificial Sequence
  source: /note="Description of Artificial Sequence: Synthetic oligonucleotide"
cucaaagcacaguuacaguauucca

SEQ ID NO: 128 - RNA, 25 nt, Artificial Sequence
  source: /note="Description of Artificial Sequence: Synthetic oligonucleotide"
accacugccaccacugaugaauuaa

SEQ ID NO: 129 - RNA, 25 nt, Artificial Sequence
  source: /note="Description of Artificial Sequence: Synthetic oligonucleotide"
gaaacuacuagugccacaucaucac

SEQ ID NO: 130 - RNA, 25 nt, Artificial Sequence
  source: /note="Description of Artificial Sequence: Synthetic oligonucleotide"
aagucggacagccucaccaaacaga

SEQ ID NO: 131 - RNA, 25 nt, Artificial Sequence
  source: /note="Description of Artificial Sequence: Synthetic oligonucleotide"
gaaagcgaaaaauggaacaugaugg

SEQ ID NO: 132 - RNA, 25 nt, Artificial Sequence
  source: /note="Description of Artificial Sequence: Synthetic oligonucleotide"
cccucugauuuagcauguagacugc

SEQ ID NO: 133 - RNA, 25 nt, Artificial Sequence
  source: /note="Description of Artificial Sequence: Synthetic oligonucleotide"
ugagcuauuuaaggaucuauuuaug

SEQ ID NO: 134 - RNA, 25 nt, Artificial Sequence
  source: /note="Description of Artificial Sequence: Synthetic oligonucleotide"
aaaaggugaaaaagcacuauuauca

SEQ ID NO: 135 - RNA, 25 nt, Artificial Sequence
  source: /note="Description of Artificial Sequence: Synthetic oligonucleotide"
gaaaaagcacuauuaucaguucugc

SEQ ID NO: 136 - RNA, 25 nt, Artificial Sequence
  source: /note="Description of Artificial Sequence: Synthetic oligonucleotide"
ggcugaaaagaaagauuaaaccuac

SEQ ID NO: 137 - RNA, 25 nt, Artificial Sequence
  source: /note="Description of Artificial Sequence: Synthetic oligonucleotide"
uaaacccuuauaauaaaauccuucu

SEQ ID NO: 138 - RNA, 25 nt, Artificial Sequence
  source: /note="Description of Artificial Sequence: Synthetic oligonucleotide"
cauacuauuagccaaugcuguagac

SEQ ID NO: 139 - RNA, 25 nt, Artificial Sequence
  source: /note="Description of Artificial Sequence: Synthetic oligonucleotide"
gacagaagcauuuugauaggaauag

SEQ ID NO: 140 - RNA, 25 nt, Artificial Sequence
  source: /note="Description of Artificial Sequence: Synthetic oligonucleotide"
agagcaaauaagauaauggcccuga

SEQ ID NO: 141 - RNA, 25 nt, Artificial Sequence
  source: /note="Description of Artificial Sequence: Synthetic oligonucleotide"
ccaacauuuuucucuuccucaagca

SEQ ID NO: 142 - RNA, 25 nt, Artificial Sequence
  source: /note="Description of Artificial Sequence: Synthetic oligonucleotide"
uuaaguaugagaaaaguucagccca

SEQ ID NO: 143 - RNA, 25 nt, Artificial Sequence
  source: /note="Description of Artificial Sequence: Synthetic oligonucleotide"
caggaauaaagauggcugcugaacc

SEQ ID NO: 144 - RNA, 25 nt, Artificial Sequence
  source: /note="Description of Artificial Sequence: Synthetic oligonucleotide"
aauuugaaugaccaaguucucuuca

SEQ ID NO: 145 - RNA, 25 nt, Artificial Sequence
  source: /note="Description of Artificial Sequence: Synthetic oligonucleotide"
auguauaaagauagccagccuagag

SEQ ID NO: 146 - RNA, 25 nt, Artificial Sequence
  source: /note="Description of Artificial Sequence: Synthetic oligonucleotide"
ggcuguaacuaucucugugaagugu

SEQ ID NO: 147 - RNA, 25 nt, Artificial Sequence
  source: /note="Description of Artificial Sequence: Synthetic oligonucleotide"
ucugugaagugugagaaaauuucaa

SEQ ID NO: 148 - RNA, 25 nt, Artificial Sequence
  source: /note="Description of Artificial Sequence: Synthetic oligonucleotide"
ccuuuaaggaaaugaauccuccuga

SEQ ID NO: 149 - RNA, 25 nt, Artificial Sequence
  source: /note="Description of Artificial Sequence: Synthetic oligonucleotide"
aaggauacaaaaagugacaucauau

SEQ ID NO: 150 - RNA, 25 nt, Artificial Sequence
  source: /note="Description of Artificial Sequence: Synthetic oligonucleotide"
agaugcaauuugaaucuucaucaua

SEQ ID NO: 151 - RNA, 25 nt, Artificial Sequence
  source: /note="Description of Artificial Sequence: Synthetic oligonucleotide"
guucaaaacgaagacuagcuauuaa

SEQ ID NO: 152 - RNA, 25 nt, Artificial Sequence
  source: /note="Description of Artificial Sequence: Synthetic oligonucleotide"
gugaaaccucaucucuacuaaaaau

SEQ ID NO: 153 - RNA, 25 nt, Artificial Sequence
  source: /note="Description of Artificial Sequence: Synthetic oligonucleotide"
acgaaagagaagcucuaucucgccu

SEQ ID NO: 154 - RNA, 25 nt, Artificial Sequence
  source: /note="Description of Artificial Sequence: Synthetic oligonucleotide"
cuccacaagcgccuucgguccaguu

SEQ ID NO: 155 - RNA, 25 nt, Artificial Sequence
  source: /note="Description of Artificial Sequence: Synthetic oligonucleotide"
gagaagauuccaaagauguagccgc

SEQ ID NO: 156 - RNA, 25 nt, Artificial Sequence
  source: /note="Description of Artificial Sequence: Synthetic oligonucleotide"
aaucuggauucaaugaggagacuug

SEQ ID NO: 157 - RNA, 25 nt, Artificial Sequence
  source: /note="Description of Artificial Sequence: Synthetic oligonucleotide"
agaacagauuugagaguagugagga

SEQ ID NO: 158 - RNA, 25 nt, Artificial Sequence
  source: /note="Description of Artificial Sequence: Synthetic oligonucleotide"
ccagagcugugcagaugaguacaaa

SEQ ID NO: 159 - RNA, 25 nt, Artificial Sequence
  source: /note="Description of Artificial Sequence: Synthetic oligonucleotide"
ccucagauuguuguuguuaaugggc

SEQ ID NO: 160 - RNA, 25 nt, Artificial Sequence
  source: /note="Description of Artificial Sequence: Synthetic oligonucleotide"
cuauuuuaauuauuuuuaauuuauu

SEQ ID NO: 161 - RNA, 25 nt, Artificial Sequence
  source: /note="Description of Artificial Sequence: Synthetic oligonucleotide"
uuuaauuuauuaauauuuaaauaug

SEQ ID NO: 162 - RNA, 25 nt, Artificial Sequence
  source: /note="Description of Artificial Sequence: Synthetic oligonucleotide"
augcaguuugaauauccuuuguuuc

SEQ ID NO: 163 - RNA, 25 nt, Artificial Sequence
  source: /note="Description of Artificial Sequence: Synthetic oligonucleotide"
caugcugcuggcgucuaaguguuug

SEQ ID NO: 164 - RNA, 25 nt, Artificial Sequence
  source: /note="Description of Artificial Sequence: Synthetic oligonucleotide"
agaugugcauuucaccugugacaaa

SEQ ID NO: 165 - RNA, 25 nt, Artificial Sequence
  source: /note="Description of Artificial Sequence: Synthetic oligonucleotide"
ucaaaaccugugccaggcugaauua

SEQ ID NO: 166 - RNA, 25 nt, Artificial Sequence
  source: /note="Description of Artificial Sequence: Synthetic oligonucleotide"
gaauguggguagucauucuuacaau

SEQ ID NO: 167 - RNA, 25 nt, Artificial Sequence
  source: /note="Description of Artificial Sequence: Synthetic oligonucleotide"
auguggguagucauucuuacaauug

SEQ ID NO: 168 - RNA, 25 nt, Artificial Sequence
  source: /note="Description of Artificial Sequence: Synthetic oligonucleotide"
ugaaaaugagcaucagagaguguac

SEQ ID NO: 169 - RNA, 25 nt, Artificial Sequence
  source: /note="Description of Artificial Sequence: Synthetic oligonucleotide"
uugcuuuucauguagaacucagcag

SEQ ID NO: 170 - RNA, 25 nt, Artificial Sequence
  source: /note="Description of Artificial Sequence: Synthetic oligonucleotide"
uguauuucuauauuuauuuucagua

SEQ ID NO: 171 - RNA, 25 nt, Artificial Sequence
  source: /note="Description of Artificial Sequence: Synthetic oligonucleotide"
uuugauuaauguuucuuaaauggaa

SEQ ID NO: 172 - RNA, 25 nt, Artificial Sequence
  source: /note="Description of Artificial Sequence: Synthetic oligonucleotide"
caacguguauagugccuaaaauugu

SEQ ID NO: 173 - RNA, 25 nt, Artificial Sequence
  source: /note="Description of Artificial Sequence: Synthetic oligonucleotide"
cauauccuuggcuacuaacaucugg

SEQ ID NO: 174 - RNA, 25 nt, Artificial Sequence
  source: /note="Description of Artificial Sequence: Synthetic oligonucleotide"
uacuaacaucuggagacugugagcu

SEQ ID NO: 175 - RNA, 25 nt, Artificial Sequence
  source: /note="Description of Artificial Sequence: Synthetic oligonucleotide"
cauaaguugugugcuuuuuauuaau

SEQ ID NO: 176 - RNA, 25 nt, Artificial Sequence
  source: /note="Description of Artificial Sequence: Synthetic oligonucleotide"
gcaucauuuuggcucuucuuacauu

SEQ ID NO: 177 - RNA, 25 nt, Artificial Sequence
  source: /note="Description of Artificial Sequence: Synthetic oligonucleotide"
gcucuucuuacauuuguaaaaaugu

SEQ ID NO: 178 - RNA, 25 nt, Artificial Sequence
  source: /note="Description of Artificial Sequence: Synthetic oligonucleotide"
agauuaggucaucuuaauucauauu

SEQ ID NO: 179 - RNA, 25 nt, Artificial Sequence
  source: /note="Description of Artificial Sequence: Synthetic oligonucleotide"
auggaauugaaagaacuaaucauga

SEQ ID NO: 180 - RNA, 25 nt, Artificial Sequence
  source: /note="Description of Artificial Sequence: Synthetic oligonucleotide"
cacacucauuccuucugcucuuggg

SEQ ID NO: 181 - RNA, 25 nt, Artificial Sequence
  source: /note="Description of Artificial Sequence: Synthetic oligonucleotide"
uguagagguaaccaguagcuuugag

SEQ ID NO: 182 - RNA, 25 nt, Artificial Sequence
  source: /note="Description of Artificial Sequence: Synthetic oligonucleotide"
caaccacaugccacguaauauuuca

SEQ ID NO: 183 - RNA, 25 nt, Artificial Sequence
  source: /note="Description of Artificial Sequence: Synthetic oligonucleotide"
ucggaaacaaguuauucucuucacu

SEQ ID NO: 184 - RNA, 25 nt, Artificial Sequence
  source: /note="Description of Artificial Sequence: Synthetic oligonucleotide"
acucccaauaacuaaugcuaagaaa

SEQ ID NO: 185 - RNA, 25 nt, Artificial Sequence
  source: /note="Description of Artificial Sequence: Synthetic oligonucleotide"
aaugcuaagaaaugcugaaaaucaa

SEQ ID NO: 186 - RNA, 25 nt, Artificial Sequence
  source: /note="Description of Artificial Sequence: Synthetic oligonucleotide"
gucuuucucuaaauaugauuacuuu

SEQ ID NO: 187 - RNA, 25 nt, Artificial Sequence
  source: /note="Description of Artificial Sequence: Synthetic oligonucleotide"
ugaauuucaggcauuuuguucuaca

SEQ ID NO: 188 - RNA, 25 nt, Artificial Sequence
  source: /note="Description of Artificial Sequence: Synthetic oligonucleotide"
cgauucccucucacccgggacucuc

SEQ ID NO: 189 - RNA, 25 nt, Artificial Sequence
  source: /note="Description of Artificial Sequence: Synthetic oligonucleotide"
aggaaagugaaccuuuaaaguaaag

SEQ ID NO: 190 - RNA, 25 nt, Artificial Sequence
  source: /note="Description of Artificial Sequence: Synthetic oligonucleotide"
gaggcugcaugcucuggaagccugg

SEQ ID NO: 191 - RNA, 25 nt, Artificial Sequence
  source: /note="Description of Artificial Sequence: Synthetic oligonucleotide"
ucucugaacagaaaacaaaagagag

SEQ ID NO: 192 - RNA, 25 nt, Artificial Sequence
  source: /note="Description of Artificial Sequence: Synthetic oligonucleotide"
aacuuggcuguaaucaguuaugccg

SEQ ID NO: 193 - RNA, 25 nt, Artificial Sequence
  source: /note="Description of Artificial Sequence: Synthetic oligonucleotide"
agaagccaaaauuaaaagaagucca

SEQ ID NO: 194 - RNA, 25 nt, Artificial Sequence
  source: /note="Description of Artificial Sequence: Synthetic oligonucleotide"
auuaaaagaaguccaggugagguua

SEQ ID NO: 195 - RNA, 25 nt, Artificial Sequence
  source: /note="Description of Artificial Sequence: Synthetic oligonucleotide"
gaauccggauuaucgggaagaggac

SEQ ID NO: 196 - RNA, 25 nt, Artificial Sequence
  source: /note="Description of Artificial Sequence: Synthetic oligonucleotide"
aaugugacaucaaagcaaguauugu

SEQ ID NO: 197 - RNA, 25 nt, Artificial Sequence
  source: /note="Description of Artificial Sequence: Synthetic oligonucleotide"
caucaaagcaaguauuguagcacuc

SEQ ID NO: 198 - RNA, 25 nt, Artificial Sequence
  source: /note="Description of Artificial Sequence: Synthetic oligonucleotide"
agagagagaaaacaaaaccacaaau

SEQ ID NO: 199 - RNA, 25 nt, Artificial Sequence
  source: /note="Description of Artificial Sequence: Synthetic oligonucleotide"
ucgcuguaguauuuaagcccauaca

SEQ ID NO: 200 - RNA, 25 nt, Artificial Sequence
  source: /note="Description of Artificial Sequence: Synthetic oligonucleotide"
cgcuguaguauuuaagcccauacag

SEQ ID NO: 201 - RNA, 25 nt, Artificial Sequence
  source: /note="Description of Artificial Sequence: Synthetic oligonucleotide"
auuuaagcccauacagaaaccuucc

SEQ ID NO: 202 - RNA, 25 nt, Artificial Sequence
  source: /note="Description of Artificial Sequence: Synthetic oligonucleotide"
auuaaaauaaacaugguauaccuac

SEQ ID NO: 203 - RNA, 25 nt, Artificial Sequence
  source: /note="Description of Artificial Sequence: Synthetic oligonucleotide"
cuguucugaucggccaguuuucgga

SEQ ID NO: 204 - RNA, 25 nt, Artificial Sequence
  source: /note="Description of Artificial Sequence: Synthetic oligonucleotide"
aaauaauuugaacuuuggaacaggg

SEQ ID NO: 205 - RNA, 25 nt, Artificial Sequence
  source: /note="Description of Artificial Sequence: Synthetic oligonucleotide"
ugcgaccuuaauuuaacuuuccagu

SEQ ID NO: 206 - RNA, 25 nt, Artificial Sequence
  source: /note="Description of Artificial Sequence: Synthetic oligonucleotide"
cugagaaagcuaaaguuugguuuug

SEQ ID NO: 207 - RNA, 25 nt, Artificial Sequence
  source: /note="Description of Artificial Sequence: Synthetic oligonucleotide"
aguaaagaugcuacuucccacugua

SEQ ID NO: 208 - RNA, 25 nt, Artificial Sequence
  source: /note="Description of Artificial Sequence: Synthetic oligonucleotide"
cugcuuaauugcugauaccauauga

SEQ ID NO: 209 - RNA, 25 nt, Artificial Sequence
  source: /note="Description of Artificial Sequence: Synthetic oligonucleotide"
uaccauaugaaugaaacaugggcug

SEQ ID NO: 210 - RNA, 25 nt, Artificial Sequence
  source: /note="Description of Artificial Sequence: Synthetic oligonucleotide"
aacuuucuuauccaacuuuuucaua

SEQ ID NO: 211 - RNA, 25 nt, Artificial Sequence
  source: /note="Description of Artificial Sequence: Synthetic oligonucleotide"
ccuugcaugacaucaugaggccgga

SEQ ID NO: 212 - RNA, 25 nt, Artificial Sequence
  source: /note="Description of Artificial Sequence: Synthetic oligonucleotide"
ugaauuuguauaugacugcauuugu

SEQ ID NO: 213 - RNA, 25 nt, Artificial Sequence
  source: /note="Description of Artificial Sequence: Synthetic oligonucleotide"
gaauccuaguagaauguuuacuacc

SEQ ID NO: 214 - RNA, 25 nt, Artificial Sequence
  source: /note="Description of Artificial Sequence: Synthetic oligonucleotide"
gaaagggaagaauuuuuugaugaaa

SEQ ID NO: 215 - RNA, 25 nt, Artificial Sequence
  source: /note="Description of Artificial Sequence: Synthetic oligonucleotide"
uaucggcaugccagugugugaauuu

SEQ ID NO: 216 - RNA, 25 nt, Artificial Sequence
  source: /note="Description of Artificial Sequence: Synthetic oligonucleotide"
caccucauaguagagcaauguaugu

SEQ ID NO: 217 - RNA, 25 nt, Artificial Sequence
  source: /note="Description of Artificial Sequence: Synthetic oligonucleotide"
ccagaauugccaaagcacauauaua

SEQ ID NO: 218 - RNA, 25 nt, Artificial Sequence
  source: /note="Description of Artificial Sequence: Synthetic oligonucleotide"
uggugaucuggguaauaguuucucc

SEQ ID NO: 219 - RNA, 25 nt, Artificial Sequence
  source: /note="Description of Artificial Sequence: Synthetic oligonucleotide"
gaucuggguaauaguuucuccaaau

SEQ ID NO: 220 - RNA, 25 nt, Artificial Sequence
  source: /note="Description of Artificial Sequence: Synthetic oligonucleotide"
ggaugugaugaauacuuccuagaaa

SEQ ID NO: 221 - RNA, 25 nt, Artificial Sequence
  source: /note="Description of Artificial Sequence: Synthetic oligonucleotide"
cauuuccacagcuacaccauauaug

SEQ ID NO: 222 - RNA, 25 nt, Artificial Sequence
  source: /note="Description of Artificial Sequence: Synthetic oligonucleotide"
acagcuacaccauauaugaauggag

SEQ ID NO: 223 - RNA, 25 nt, Artificial Sequence
  source: /note="Description of Artificial Sequence: Synthetic oligonucleotide"
ugcaguucuuacacgagaagaagau

SEQ ID NO: 224 - RNA, 25 nt, Artificial Sequence
  source: /note="Description of Artificial Sequence: Synthetic oligonucleotide"
acgagaagaagaucauuuacaggga

SEQ ID NO: 225 - RNA, 25 nt, Artificial Sequence
  source: /note="Description of Artificial Sequence: Synthetic oligonucleotide"
cgagaagaagaucauuuacagggac

SEQ ID NO: 226 - RNA, 25 nt, Artificial Sequence
  source: /note="Description of Artificial Sequence: Synthetic oligonucleotide"
aagaagaucauuuacagggaccuga

SEQ ID NO: 227 - RNA, 25 nt, Artificial Sequence
  source: /note="Description of Artificial Sequence: Synthetic oligonucleotide"
agaggaagagguguuugacugcauc

SEQ ID NO: 228 - RNA, 25 nt, Artificial Sequence
  source: /note="Description of Artificial Sequence: Synthetic oligonucleotide"
gaggaagagguguuugacugcaucg

SEQ ID NO: 229 - RNA, 25 nt, Artificial Sequence
  source: /note="Description of Artificial Sequence: Synthetic oligonucleotide"
cuacuuugagggcgaguucacaggg

SEQ ID NO: 230 - RNA, 25 nt, Artificial Sequence
  source: /note="Description of Artificial Sequence: Synthetic oligonucleotide"
agggcaucuccuggcaccucugucc

SEQ ID NO: 231 - RNA, 25 nt, Artificial Sequence
  source: /note="Description of Artificial Sequence: Synthetic oligonucleotide"
ggagugauaugguuugucuuuuuaa

SEQ ID NO: 232 - RNA, 25 nt, Artificial Sequence
  source: /note="Description of Artificial Sequence: Synthetic oligonucleotide"
gagugauaugguuugucuuuuuaag

SEQ ID NO: 233 - RNA, 25 nt, Artificial Sequence
  source: /note="Description of Artificial Sequence: Synthetic oligonucleotide"
ugcaguaaagauccuaaagguuguc

SEQ ID NO: 234 - RNA, 25 nt, Artificial Sequence
  source: /note="Description of Artificial Sequence: Synthetic oligonucleotide"
aguaaagauccuaaagguugucgac

SEQ ID NO: 235 - RNA, 25 nt, Artificial Sequence
  source: /note="Description of Artificial Sequence: Synthetic oligonucleotide"
ugacaaaggacaaccuggcaauugu

SEQ ID NO: 236 - RNA, 25 nt, Artificial Sequence
  source: /note="Description of Artificial Sequence: Synthetic oligonucleotide"
gcaauugugacccaguggugcgagg

SEQ ID NO: 237 - RNA, 25 nt, Artificial Sequence
  source: /note="Description of Artificial Sequence: Synthetic oligonucleotide"
aacaucauccauagagacaugaaau

SEQ ID NO: 238 - RNA, 25 nt, Artificial Sequence
  source: /note="Description of Artificial Sequence: Synthetic oligonucleotide"
ugaaauccaacaauauauuucucca

SEQ ID NO: 239 - RNA, 25 nt, Artificial Sequence
  source: /note="Description of Artificial Sequence: Synthetic oligonucleotide"
aacaauauauuucuccaugaaggcu

SEQ ID NO: 240 - RNA, 25 nt, Artificial Sequence
  source: /note="Description of Artificial Sequence: Synthetic oligonucleotide"
aacaguaaagucacgcuggaguggu

SEQ ID NO: 241 - RNA, 25 nt, Artificial Sequence
  source: /note="Description of Artificial Sequence: Synthetic oligonucleotide"
ugugaagaaaguaaaggaagagagg

SEQ ID NO: 242 - RNA, 25 nt, Artificial Sequence
  source: /note="Description of Artificial Sequence: Synthetic oligonucleotide"
cuuccgagccauccuugcaucgggc

SEQ ID NO: 243 - RNA, 25 nt, Artificial Sequence
  source: /note="Description of Artificial Sequence: Synthetic oligonucleotide"
aauggagguugaauauccuacugug

SEQ ID NO: 244 - RNA, 25 nt, Artificial Sequence
  source: /note="Description of Artificial Sequence: Synthetic oligonucleotide"
ggagguugaauauccuacuguguaa

SEQ ID NO: 245 - RNA, 25 nt, Artificial Sequence
  source: /note="Description of Artificial Sequence: Synthetic oligonucleotide"
auuuugaguuuucccuuguagugua

SEQ ID NO: 246 - RNA, 25 nt, Artificial Sequence
  source: /note="Description of Artificial Sequence: Synthetic oligonucleotide"
uauccuguuuguucuuuguugauug

SEQ ID NO: 247 - RNA, 25 nt, Artificial Sequence
  source: /note="Description of Artificial Sequence: Synthetic oligonucleotide"
ccuguuuguucuuuguugauugaaa

SEQ ID NO: 248 - RNA, 25 nt, Artificial Sequence
  source: /note="Description of Artificial Sequence: Synthetic oligonucleotide"
cucuacagccuucuuuuucuuccau

SEQ ID NO: 249 - RNA, 25 nt, Artificial Sequence
  source: /note="Description of Artificial Sequence: Synthetic oligonucleotide"
ucuuccauagcuaaucuuccuucua

SEQ ID NO: 250 - RNA, 25 nt, Artificial Sequence
  source: /note="Description of Artificial Sequence: Synthetic oligonucleotide"
auaaucuuccuguugaaugcuucau

SEQ ID NO: 251 - RNA, 25 nt, Artificial Sequence
  source: /note="Description of Artificial Sequence: Synthetic oligonucleotide"
uaaucuuccuguugaaugcuucaug

SEQ ID NO: 252 - RNA, 25 nt, Artificial Sequence
  source: /note="Description of Artificial Sequence: Synthetic oligonucleotide"
cuucaugacuugaauucuacuuuga

SEQ ID NO: 253 - RNA, 25 nt, Artificial Sequence
  source: /note="Description of Artificial Sequence: Synthetic oligonucleotide"
aagagggagagaagcaacuacagac

SEQ ID NO: 254 - RNA, 25 nt, Artificial Sequence
  source: /note="Description of Artificial Sequence: Synthetic oligonucleotide"
cgucuccuaccagaccaaggucaac

SEQ ID NO: 255 - RNA, 25 nt, Artificial Sequence
  source: /note="Description of Artificial Sequence: Synthetic oligonucleotide"
gaucaaucggcccgacuaucucgac

SEQ ID NO: 256 - RNA, 25 nt, Artificial Sequence
  source: /note="Description of Artificial Sequence: Synthetic oligonucleotide"
ggacgaacauccaaccuucccaaac

SEQ ID NO: 257 - RNA, 25 nt, Artificial Sequence
  source: /note="Description of Artificial Sequence: Synthetic oligonucleotide"
agggucggaacccaagcuuagaacu

SEQ ID NO: 258 - RNA, 25 nt, Artificial Sequence
  source: /note="Description of Artificial Sequence: Synthetic oligonucleotide"
ucggaacccaagcuuagaacuuuaa

SEQ ID NO: 259 - RNA, 25 nt, Artificial Sequence
  source: /note="Description of Artificial Sequence: Synthetic oligonucleotide"
acccaagcuuagaacuuuaagcaac

SEQ ID NO: 260 - RNA, 25 nt, Artificial Sequence
  source: /note="Description of Artificial Sequence: Synthetic oligonucleotide"
gaacuuuaagcaacaagaccaccac

SEQ ID NO: 261 - RNA, 25 nt, Artificial Sequence
  source: /note="Description of Artificial Sequence: Synthetic oligonucleotide"
acuauucaguggcgagaaauaaagu

SEQ ID NO: 262 - RNA, 25 nt, Artificial Sequence
  source: /note="Description of Artificial Sequence: Synthetic oligonucleotide"
cuauucaguggcgagaaauaaaguu

SEQ ID NO: 263 - RNA, 25 nt, Artificial Sequence
  source: /note="Description of Artificial Sequence: Synthetic oligonucleotide"
aaacacagauaacaggaaaugaucc

SEQ ID NO: 264 - RNA, 25 nt, Artificial Sequence
  source: /note="Description of Artificial Sequence: Synthetic oligonucleotide"
cuuaagaaaagagaagaaaugaaac

SEQ ID NO: 265 - RNA, 25 nt, Artificial Sequence
  source: /note="Description of Artificial Sequence: Synthetic oligonucleotide"
cugaaggaguguguuuccauccucc

SEQ ID NO: 266 - RNA, 25 nt, Artificial Sequence
  source: /note="Description of Artificial Sequence: Synthetic oligonucleotide"
ucaccgcgggacugaaaaucuuuga

SEQ ID NO: 267 - RNA, 25 nt, Artificial Sequence
  source: /note="Description of Artificial Sequence: Synthetic oligonucleotide"
agcagaaauaagcgugccguucagg

SEQ ID NO: 268 - RNA, 25 nt, Artificial Sequence
  source: /note="Description of Artificial Sequence: Synthetic oligonucleotide"
aagcgugccguucaggguccagaag

SEQ ID NO: 269 - RNA, 25 nt, Artificial Sequence
  source: /note="Description of Artificial Sequence: Synthetic oligonucleotide"
agaaacagucacucaagacugcuug

SEQ ID NO: 270 - RNA, 25 nt, Artificial Sequence
  source: /note="Description of Artificial Sequence: Synthetic oligonucleotide"
agaggaagaagguccaugucuuugg

SEQ ID NO: 271 - RNA, 25 nt, Artificial Sequence
  source: /note="Description of Artificial Sequence: Synthetic oligonucleotide"
uguauucaaaauaugccugaaacac

SEQ ID NO: 272 - RNA, 25 nt, Artificial Sequence
  source: /note="Description of Artificial Sequence: Synthetic oligonucleotide"
auuuuccucccuuucucuguaccuc

SEQ ID NO: 273 - RNA, 25 nt, Artificial Sequence
  source: /note="Description of Artificial Sequence: Synthetic oligonucleotide"
caaagaaagauagagcaagacaaga

SEQ ID NO: 274 - RNA, 25 nt, Artificial Sequence
  source: /note="Description of Artificial Sequence: Synthetic oligonucleotide"
aagaaagauagagcaagacaagaaa

SEQ ID NO: 275 - RNA, 25 nt, Artificial Sequence
  source: /note="Description of Artificial Sequence: Synthetic oligonucleotide"
gaaagcauuuguuuguacaagaucc

SEQ ID NO: 276 - RNA, 25 nt, Artificial Sequence
  source: /note="Description of Artificial Sequence: Synthetic oligonucleotide"
ugaguuaaacgaacguacuugcaga

SEQ ID NO: 277 - RNA, 25 nt, Artificial Sequence
  source: /note="Description of Artificial Sequence: Synthetic oligonucleotide"
acugauacagaacgaucgauacaga

SEQ ID NO: 278 - RNA, 25 nt, Artificial Sequence
  source: /note="Description of Artificial Sequence: Synthetic oligonucleotide"
auauuauauauauauaaaaauaaau

SEQ ID NO: 279 - RNA, 25 nt, Artificial Sequence
  source: /note="Description of Artificial Sequence: Synthetic oligonucleotide"
auuauauauauauaaaaauaaauau

SEQ ID NO: 280 - RNA, 25 nt, Artificial Sequence
  source: /note="Description of Artificial Sequence: Synthetic oligonucleotide"
ucacuggauguauuugacugcugug

SEQ ID NO: 281 - RNA, 25 nt, Artificial Sequence
  source: /note="Description of Artificial Sequence: Synthetic oligonucleotide"
cagggaagaggaggagaugagagac

SEQ ID NO: 282 - RNA, 25 nt, Artificial Sequence
  source: /note="Description of Artificial Sequence: Synthetic oligonucleotide"
augaucuuuuuuuugucccacuugg

SEQ ID NO: 283 - RNA, 27 nt, Artificial Sequence
  source: /note="Description of Artificial Sequence: Synthetic oligonucleotide"
ggccgugaacuccucaucaaaauaccu

SEQ ID NO: 284 - RNA, 27 nt, Artificial Sequence
  source: /note="Description of Artificial Sequence: Synthetic oligonucleotide"
uggugugauggugaucaucugggccgu

SEQ ID NO: 285 - RNA, 27 nt, Artificial Sequence
  source: /note="Description of Artificial Sequence: Synthetic oligonucleotide"
aaacccgcaggauaguuuucuucccua

SEQ ID NO: 286 - RNA, 27 nt, Artificial Sequence
  source: /note="Description of Artificial Sequence: Synthetic oligonucleotide"
caaacuggaugaaauaaauuaaaaccc

SEQ ID NO: 287 - RNA, 27 nt, Artificial Sequence
  source: /note="Description of Artificial Sequence: Synthetic oligonucleotide"
agaaguccuuaacauuucccuacguga

SEQ ID NO: 288 - RNA, 27 nt, Artificial Sequence
  source: /note="Description of Artificial Sequence: Synthetic oligonucleotide"
cucugucccacuggguaaacccuggcc

SEQ ID NO: 289 - RNA, 27 nt, Artificial Sequence
  source: /note="Description of Artificial Sequence: Synthetic oligonucleotide"
cacaauaacaaauuuaaaccuugcucc

SEQ ID NO: 290 - RNA, 27 nt, Artificial Sequence
  source: /note="Description of Artificial Sequence: Synthetic oligonucleotide"
aaaugcauuugaacaacauaauacaca

SEQ ID NO: 291 - RNA, 27 nt, Artificial Sequence
  source: /note="Description of Artificial Sequence: Synthetic oligonucleotide"
ggcuuuccugucacaaagauuaaaaac

SEQ ID NO: 292 - RNA, 27 nt, Artificial Sequence
  source: /note="Description of Artificial Sequence: Synthetic oligonucleotide"
agggcuuuccugucacaaagauuaaaa

SEQ ID NO: 293 - RNA, 27 nt, Artificial Sequence
  source: /note="Description of Artificial Sequence: Synthetic oligonucleotide"
ggccaugcugggagacauaagcagcag

SEQ ID NO: 294 - RNA, 27 nt, Artificial Sequence
  source: /note="Description of Artificial Sequence: Synthetic oligonucleotide"
ucagggagaagcuucugaaacacuucu

SEQ ID NO: 295 - RNA, 27 nt, Artificial Sequence
  source: /note="Description of Artificial Sequence: Synthetic oligonucleotide"
aagggcuucuuccuuauugauggucag

SEQ ID NO: 296 - RNA, 27 nt, Artificial Sequence
  source: /note="Description of Artificial Sequence: Synthetic oligonucleotide"
ugaagggcuucuuccuuauugaugguc

SEQ ID NO: 297 - RNA, 27 nt, Artificial Sequence
  source: /note="Description of Artificial Sequence: Synthetic oligonucleotide"
cgcugaagggcuucuuccuuauugaug

SEQ ID NO: 298 - RNA, 27 nt, Artificial Sequence
  source: /note="Description of Artificial Sequence: Synthetic oligonucleotide"
gccgcugaagggcuucuuccuuauuga

SEQ ID NO: 299 - RNA, 27 nt, Artificial Sequence
  source: /note="Description of Artificial Sequence: Synthetic oligonucleotide"
acuggccgcugaagggcuucuuccuua

SEQ ID NO: 300 - RNA, 27 nt, Artificial Sequence
  source: /note="Description of Artificial Sequence: Synthetic oligonucleotide"
cggagcuuuucaccuuuaguuaugcuu

SEQ ID NO: 301 - RNA, 27 nt, Artificial Sequence
  source: /note="Description of Artificial Sequence: Synthetic oligonucleotide"
ccggagcuuuucaccuuuaguuaugcu

SEQ ID NO: 302 - RNA, 27 nt, Artificial Sequence
  source: /note="Description of Artificial Sequence: Synthetic oligonucleotide"
cagacuguugacuggcgugauguaguu

SEQ ID NO: 303 - RNA, 27 nt, Artificial Sequence
  source: /note="Description of Artificial Sequence: Synthetic oligonucleotide"
cuuuugaacucugcuuaaauccagugg

SEQ ID NO: 304 - RNA, 27 nt, Artificial Sequence
  source: /note="Description of Artificial Sequence: Synthetic oligonucleotide"
gcuuuugaacucugcuuaaauccagug

SEQ ID NO: 305 - RNA, 27 nt, Artificial Sequence
  source: /note="Description of Artificial Sequence: Synthetic oligonucleotide"
agggcuuuugaacucugcuuaaaucca

SEQ ID NO: 306 - RNA, 27 nt, Artificial Sequence
  source: /note="Description of Artificial Sequence: Synthetic oligonucleotide"
aagggcuuuugaacucugcuuaaaucc

SEQ ID NO: 307 - RNA, 27 nt, Artificial Sequence
  source: /note="Description of Artificial Sequence: Synthetic oligonucleotide"
ugaagggcuuuugaacucugcuuaaau

SEQ ID NO: 308 - RNA, 27 nt, Artificial Sequence
  source: /note="Description of Artificial Sequence: Synthetic oligonucleotide"
cugaagggcuuuugaacucugcuuaaa

SEQ ID NO: 309 - RNA, 27 nt, Artificial Sequence
  source: /note="Description of Artificial Sequence: Synthetic oligonucleotide"
cgcugaagggcuuuugaacucugcuua

SEQ ID NO: 310 - RNA, 27 nt, Artificial Sequence
  source: /note="Description of Artificial Sequence: Synthetic oligonucleotide"
cgagcggcuucacucagacccugaggc

SEQ ID NO: 311 - RNA, 27 nt, Artificial Sequence
  source: /note="Description of Artificial Sequence: Synthetic oligonucleotide"
uugacuggcgugauguaguugcuuggg

SEQ ID NO: 312 - RNA, 27 nt, Artificial Sequence
  source: /note="Description of Artificial Sequence: Synthetic oligonucleotide"
cacgcaccaagaagcugccauugaucc

SEQ ID NO: 313 - RNA, 27 nt, Artificial Sequence
  source: /note="Description of Artificial Sequence: Synthetic oligonucleotide"
cugaugaauccaaugugggcuggaauc

SEQ ID NO: 314 - RNA, 27 nt, Artificial Sequence
  source: /note="Description of Artificial Sequence: Synthetic oligonucleotide"
cuuagguauuccacauucucagcugug

SEQ ID NO: 315 - RNA, 27 nt, Artificial Sequence
  source: /note="Description of Artificial Sequence: Synthetic oligonucleotide"
ugagccucaaauuaggagauacguuuu

SEQ ID NO: 316 - RNA, 27 nt, Artificial Sequence
  source: /note="Description of Artificial Sequence: Synthetic oligonucleotide"
ccaauuguagagaaauuauuuuaggaa

SEQ ID NO: 317 - RNA, 27 nt, Artificial Sequence
  source: /note="Description of Artificial Sequence: Synthetic oligonucleotide"
ggcuccuaacuagcugaaucuuccaau

SEQ ID NO: 318 - RNA, 27 nt, Artificial Sequence
  source: /note="Description of Artificial Sequence: Synthetic oligonucleotide"
guggauauugacuaggagaguuuaaaa

SEQ ID NO: 319 - RNA, 27 nt, Artificial Sequence
  source: /note="Description of Artificial Sequence: Synthetic oligonucleotide"
ugugacugaacauaacuguaggcugaa

SEQ ID NO: 320 - RNA, 27 nt, Artificial Sequence
  source: /note="Description of Artificial Sequence: Synthetic oligonucleotide"
guaugugugugugacugaacauaacug

SEQ ID NO: 321 - RNA, 27 nt, Artificial Sequence
  source: /note="Description of Artificial Sequence: Synthetic oligonucleotide"
aagcaaaaggaacauuuuguaugugug

SEQ ID NO: 322 - RNA, 27 nt, Artificial Sequence
  source: /note="Description of Artificial Sequence: Synthetic oligonucleotide"
aaaaauuacuuuaaaagcaaaaggaac

SEQ ID NO: 323 - RNA, 27 nt, Artificial Sequence
  source: /note="Description of Artificial Sequence: Synthetic oligonucleotide"
ccauugacuguugcuucacaggucaga

SEQ ID NO: 324 - RNA, 27 nt, Artificial Sequence
  source: /note="Description of Artificial Sequence: Synthetic oligonucleotide"
auugguuugucgaugugugagauaguu

SEQ ID NO: 325 - RNA, 27 nt, Artificial Sequence
  source: /note="Description of Artificial Sequence: Synthetic oligonucleotide"
agugguagcaguacaauugaggacaag

SEQ ID NO: 326 - RNA, 27 nt, Artificial Sequence
  source: /note="Description of Artificial Sequence: Synthetic oligonucleotide"
uaagaccgcuugccagcuacgguuuca

SEQ ID NO: 327 - RNA, 27 nt, Artificial Sequence
  source: /note="Description of Artificial Sequence: Synthetic oligonucleotide"
agccgguaagaccgcuugccagcuacg

SEQ ID NO: 328 - RNA, 27 nt, Artificial Sequence
  source: /note="Description of Artificial Sequence: Synthetic oligonucleotide"
gguaacccaucuuuuaaccauacaacu

SEQ ID NO: 329 - RNA, 27 nt, Artificial Sequence
  source: /note="Description of Artificial Sequence: Synthetic oligonucleotide"
ucgcagguaacccaucuuuuaaccaua

SEQ ID NO: 330 - RNA, 27 nt, Artificial Sequence
  source: /note="Description of Artificial Sequence: Synthetic oligonucleotide"
cucagcaagauuguauaauucccugca

SEQ ID NO: 331 - RNA, 27 nt, Artificial Sequence
  source: /note="Description of Artificial Sequence: Synthetic oligonucleotide"
acuguuuuaugcucagcaagauuguau

SEQ ID NO: 332 - RNA, 27 nt, Artificial Sequence
  source: /note="Description of Artificial Sequence: Synthetic oligonucleotide"
aggauaaaggacucuucauuauuggaa

SEQ ID NO: 333 - RNA, 27 nt, Artificial Sequence
  source: /note="Description of Artificial Sequence: Synthetic oligonucleotide"
caacuugcguuggaacauccaaagugu

SEQ ID NO: 334 - RNA, 27 nt, Artificial Sequence
  source: /note="Description of Artificial Sequence: Synthetic oligonucleotide"
augguuucaguuuaguggaagcauuua

SEQ ID NO: 335 - RNA, 27 nt, Artificial Sequence
  source: /note="Description of Artificial Sequence: Synthetic oligonucleotide"
auauuuaacaaagucaaacuuucucac

SEQ ID NO: 336 - RNA, 27 nt, Artificial Sequence
  source: /note="Description of Artificial Sequence: Synthetic oligonucleotide"
aacuuuuaauauacaguaguucuuuuc

SEQ ID NO: 337 - RNA, 27 nt, Artificial Sequence
  source: /note="Description of Artificial Sequence: Synthetic oligonucleotide"
guuaagucaaaacccguauuucuaaag

SEQ ID NO: 338 - RNA, 27 nt, Artificial Sequence
  source: /note="Description of Artificial Sequence: Synthetic oligonucleotide"
gugcugaguuugcuguacccauguuga

SEQ ID NO: 339 - RNA, 27 nt, Artificial Sequence
  source: /note="Description of Artificial Sequence: Synthetic oligonucleotide"
ugaggucagcaucuucugugucuuuac

SEQ ID NO: 340 - RNA, 27 nt, Artificial Sequence
  source: /note="Description of Artificial Sequence: Synthetic oligonucleotide"
gcgaucugaauaaaccucccuacuagc

SEQ ID NO: 341 - RNA, 27 nt, Artificial Sequence
  source: /note="Description of Artificial Sequence: Synthetic oligonucleotide"
aucccagaacccugcugcagaaggcca

SEQ ID NO: 342 - RNA, 27 nt, Artificial Sequence
  source: /note="Description of Artificial Sequence: Synthetic oligonucleotide"
cauaauuuccaauauguaccagaccuu

SEQ ID NO: 343 - RNA, 27 nt, Artificial Sequence
  source: /note="Description of Artificial Sequence: Synthetic oligonucleotide"
cuagugcuuccaucggaaggacuaggu

SEQ ID NO: 344 - RNA, 27 nt, Artificial Sequence
  source: /note="Description of Artificial Sequence: Synthetic oligonucleotide"
uccacauaaaaacaauauucacuggga

SEQ ID NO: 345 - RNA, 27 nt, Artificial Sequence
  source: /note="Description of Artificial Sequence: Synthetic oligonucleotide"
ucuaccaauuccaacuugaauucauug

SEQ ID NO: 346 - RNA, 27 nt, Artificial Sequence
  source: /note="Description of Artificial Sequence: Synthetic oligonucleotide"
ucuccaagucuaaaucuguguccugag

SEQ ID NO: 347 - RNA, 27 nt, Artificial Sequence
  source: /note="Description of Artificial Sequence: Synthetic oligonucleotide"
uggaauacuguaacugugcuuugagga

SEQ ID NO: 348 - RNA, 27 nt, Artificial Sequence
  source: /note="Description of Artificial Sequence: Synthetic oligonucleotide"
uuaauucaucagugguggcagugguag

SEQ ID NO: 349 - RNA, 27 nt, Artificial Sequence
  source: /note="Description of Artificial Sequence: Synthetic oligonucleotide"
gugaugauguggcacuaguaguuucuu

SEQ ID NO: 350 - RNA, 27 nt, Artificial Sequence
  source: /note="Description of Artificial Sequence: Synthetic oligonucleotide"
ucuguuuggugaggcuguccgacuuug

SEQ ID NO: 351 - RNA, 27 nt, Artificial Sequence
  source: /note="Description of Artificial Sequence: Synthetic oligonucleotide"
ccaucauguuccauuuuucgcuuucuc

SEQ ID NO: 352 - RNA, 27 nt, Artificial Sequence
  source: /note="Description of Artificial Sequence: Synthetic oligonucleotide"
gcagucuacaugcuaaaucagagggua

SEQ ID NO: 353 - RNA, 27 nt, Artificial Sequence
  source: /note="Description of Artificial Sequence: Synthetic oligonucleotide"
cauaaauagauccuuaaauagcucaaa

SEQ ID NO: 354 - RNA, 27 nt, Artificial Sequence
  source: /note="Description of Artificial Sequence: Synthetic oligonucleotide"
ugauaauagugcuuuuucaccuuuuuc

SEQ ID NO: 355 - RNA, 27 nt, Artificial Sequence
  source: /note="Description of Artificial Sequence: Synthetic oligonucleotide"
gcagaacugauaauagugcuuuuucac

SEQ ID NO: 356 - RNA, 27 nt, Artificial Sequence
  source: /note="Description of Artificial Sequence: Synthetic oligonucleotide"
guagguuuaaucuuucuuuucagccau

SEQ ID NO: 357 - RNA, 27 nt, Artificial Sequence
  source: /note="Description of Artificial Sequence: Synthetic oligonucleotide"
agaaggauuuuauuauaaggguuuaau

SEQ ID NO: 358 - RNA, 27 nt, Artificial Sequence
  source: /note="Description of Artificial Sequence: Synthetic oligonucleotide"
gucuacagcauuggcuaauaguaugaa

SEQ ID NO: 359 - RNA, 27 nt, Artificial Sequence
  source: /note="Description of Artificial Sequence: Synthetic oligonucleotide"
cuauuccuaucaaaaugcuucugucua

SEQ ID NO: 360 - RNA, 27 nt, Artificial Sequence
  source: /note="Description of Artificial Sequence: Synthetic oligonucleotide"
ucagggccauuaucuuauuugcucuau

SEQ ID NO: 361 - RNA, 27 nt, Artificial Sequence
  source: /note="Description of Artificial Sequence: Synthetic oligonucleotide"
ugcuugaggaagagaaaaauguugguc

SEQ ID NO: 362 - RNA, 27 nt, Artificial Sequence
  source: /note="Description of Artificial Sequence: Synthetic oligonucleotide"
ugggcugaacuuuucucauacuuaaag

SEQ ID NO: 363 - RNA, 27 nt, Artificial Sequence
  source: /note="Description of Artificial Sequence: Synthetic oligonucleotide"
gguucagcagccaucuuuauuccugcg

SEQ ID NO: 364 - RNA, 27 nt, Artificial Sequence
  source: /note="Description of Artificial Sequence: Synthetic oligonucleotide"
ugaagagaacuuggucauucaaauuuc

SEQ ID NO: 365 - RNA, 27 nt, Artificial Sequence
  source: /note="Description of Artificial Sequence: Synthetic oligonucleotide"
cucuaggcuggcuaucuuuauacauac

SEQ ID NO: 366 - RNA, 27 nt, Artificial Sequence
  source: /note="Description of Artificial Sequence: Synthetic oligonucleotide"
acacuucacagagauaguuacagccau

SEQ ID NO: 367 - RNA, 27 nt, Artificial Sequence
  source: /note="Description of Artificial Sequence: Synthetic oligonucleotide"
uugaaauuuucucacacuucacagaga

SEQ ID NO: 368 - RNA, 27 nt, Artificial Sequence
  source: /note="Description of Artificial Sequence: Synthetic oligonucleotide"
ucaggaggauucauuuccuuaaaggaa

SEQ ID NO: 369 - RNA, 27 nt, Artificial Sequence
  source: /note="Description of Artificial Sequence: Synthetic oligonucleotide"
auaugaugucacuuuuuguauccuuga

SEQ ID NO: 370 - RNA, 27 nt, Artificial Sequence
  source: /note="Description of Artificial Sequence: Synthetic oligonucleotide"
uaugaugaagauucaaauugcaucuua

SEQ ID NO: 371 - RNA, 27 nt, Artificial Sequence
  source: /note="Description of Artificial Sequence: Synthetic oligonucleotide"
uuaauagcuagucuucguuuugaacag

SEQ ID NO: 372 - RNA, 27 nt, Artificial Sequence
  source: /note="Description of Artificial Sequence: Synthetic oligonucleotide"
auuuuuaguagagaugagguuucacca

SEQ ID NO: 373 - RNA, 27 nt, Artificial Sequence
  source: /note="Description of Artificial Sequence: Synthetic oligonucleotide"
aggcgagauagagcuucucuuucguuc

SEQ ID NO: 374 - RNA, 27 nt, Artificial Sequence
  source: /note="Description of Artificial Sequence: Synthetic oligonucleotide"
aacuggaccgaaggcgcuuguggagaa

SEQ ID NO: 375 - RNA, 27 nt, Artificial Sequence
  source: /note="Description of Artificial Sequence: Synthetic oligonucleotide"
gcggcuacaucuuuggaaucuucuccu

SEQ ID NO: 376 - RNA, 27 nt, Artificial Sequence
  source: /note="Description of Artificial Sequence: Synthetic oligonucleotide"
caagucuccucauugaauccagauugg

SEQ ID NO: 377 - RNA, 27 nt, Artificial Sequence
  source: /note="Description of Artificial Sequence: Synthetic oligonucleotide"
uccucacuacucucaaaucuguucugg

SEQ ID NO: 378 - RNA, 27 nt, Artificial Sequence
  source: /note="Description of Artificial Sequence: Synthetic oligonucleotide"
uuuguacucaucugcacagcucuggcu

SEQ ID NO: 379 - RNA, 27 nt, Artificial Sequence
  source: /note="Description of Artificial Sequence: Synthetic oligonucleotide"
gcccauuaacaacaacaaucugaggug

SEQ ID NO: 380 - RNA, 27 nt, Artificial Sequence
  source: /note="Description of Artificial Sequence: Synthetic oligonucleotide"
aauaaauuaaaaauaauuaaaauagug

SEQ ID NO: 381 - RNA, 27 nt, Artificial Sequence
  source: /note="Description of Artificial Sequence: Synthetic oligonucleotide"
cauauuuaaauauuaauaaauuaaaaa

SEQ ID NO: 382 - RNA, 27 nt, Artificial Sequence
  source: /note="Description of Artificial Sequence: Synthetic oligonucleotide"
gaaacaaaggauauucaaacugcauag

SEQ ID NO: 383 - RNA, 27 nt, Artificial Sequence
  source: /note="Description of Artificial Sequence: Synthetic oligonucleotide"
caaacacuuagacgccagcagcauggg

SEQ ID NO: 384 - RNA, 27 nt, Artificial Sequence
  source: /note="Description of Artificial Sequence: Synthetic oligonucleotide"
uuugucacaggugaaaugcacaucuga

SEQ ID NO: 385 - RNA, 27 nt, Artificial Sequence
  source: /note="Description of Artificial Sequence: Synthetic oligonucleotide"
uaauucagccuggcacagguuuugauc

SEQ ID NO: 386 - RNA, 27 nt, Artificial Sequence
  source: /note="Description of Artificial Sequence: Synthetic oligonucleotide"
auuguaagaaugacuacccacauucac

SEQ ID NO: 387 - RNA, 27 nt, Artificial Sequence
  source: /note="Description of Artificial Sequence: Synthetic oligonucleotide"
caauuguaagaaugacuacccacauuc

SEQ ID NO: 388 - RNA, 27 nt, Artificial Sequence
  source: /note="Description of Artificial Sequence: Synthetic oligonucleotide"
guacacucucugaugcucauuuucaua

SEQ ID NO: 389 - RNA, 27 nt, Artificial Sequence
  source: /note="Description of Artificial Sequence: Synthetic oligonucleotide"
cugcugaguucuacaugaaaagcaaau

SEQ ID NO: 390 - RNA, 27 nt, Artificial Sequence
  source: /note="Description of Artificial Sequence: Synthetic oligonucleotide"
uacugaaaauaaauauagaaauacaac

SEQ ID NO: 391 - RNA, 27 nt, Artificial Sequence
  source: /note="Description of Artificial Sequence: Synthetic oligonucleotide"
uuccauuuaagaaacauuaaucaaaac

SEQ ID NO: 392 - RNA, 27 nt, Artificial Sequence
  source: /note="Description of Artificial Sequence: Synthetic oligonucleotide"
acaauuuuaggcacuauacacguuguu

SEQ ID NO: 393 - RNA, 27 nt, Artificial Sequence
  source: /note="Description of Artificial Sequence: Synthetic oligonucleotide"
ccagauguuaguagccaaggauauggu

SEQ ID NO: 394 - RNA, 27 nt, Artificial Sequence
  source: /note="Description of Artificial Sequence: Synthetic oligonucleotide"
agcucacagucuccagauguuaguagc

SEQ ID NO: 395 - RNA, 27 nt, Artificial Sequence
  source: /note="Description of Artificial Sequence: Synthetic oligonucleotide"
auuaauaaaaagcacacaacuuauggc

SEQ ID NO: 396 - RNA, 27 nt, Artificial Sequence
  source: /note="Description of Artificial Sequence: Synthetic oligonucleotide"
aauguaagaagagccaaaaugaugcau

SEQ ID NO: 397 - RNA, 27 nt, Artificial Sequence
  source: /note="Description of Artificial Sequence: Synthetic oligonucleotide"
acauuuuuacaaauguaagaagagcca

SEQ ID NO: 398 - RNA, 27 nt, Artificial Sequence
  source: /note="Description of Artificial Sequence: Synthetic oligonucleotide"
aauaugaauuaagaugaccuaaucugu

SEQ ID NO: 399 - RNA, 27 nt, Artificial Sequence
  source: /note="Description of Artificial Sequence: Synthetic oligonucleotide"
ucaugauuaguucuuucaauuccaucc

SEQ ID NO: 400 - RNA, 27 nt, Artificial Sequence
  source: /note="Description of Artificial Sequence: Synthetic oligonucleotide"
cccaagagcagaaggaaugagugugca

SEQ ID NO: 401 - RNA, 27 nt, Artificial Sequence
  source: /note="Description of Artificial Sequence: Synthetic oligonucleotide"
cucaaagcuacugguuaccucuacacc

SEQ ID NO: 402 - RNA, 27 nt, Artificial Sequence
  source: /note="Description of Artificial Sequence: Synthetic oligonucleotide"
ugaaauauuacguggcaugugguuggg

SEQ ID NO: 403 - RNA, 27 nt, Artificial Sequence
  source: /note="Description of Artificial Sequence: Synthetic oligonucleotide"
agugaagagaauaacuuguuuccgaag

SEQ ID NO: 404 - RNA, 27 nt, Artificial Sequence
  source: /note="Description of Artificial Sequence: Synthetic oligonucleotide"
uuucuuagcauuaguuauugggaguga

SEQ ID NO: 405 - RNA, 27 nt, Artificial Sequence
  source: /note="Description of Artificial Sequence: Synthetic oligonucleotide"
uugauuuucagcauuucuuagcauuag

SEQ ID NO: 406 - RNA, 27 nt, Artificial Sequence
  source: /note="Description of Artificial Sequence: Synthetic oligonucleotide"
aaaguaaucauauuuagagaaagacag

SEQ ID NO: 407 - RNA, 27 nt, Artificial Sequence
  source: /note="Description of Artificial Sequence: Synthetic oligonucleotide"
uguagaacaaaaugccugaaauucagc

SEQ ID NO: 408 - RNA, 27 nt, Artificial Sequence
  source: /note="Description of Artificial Sequence: Synthetic oligonucleotide"
gagagucccgggugagagggaaucgcc

SEQ ID NO: 409 - RNA, 27 nt, Artificial Sequence
  source: /note="Description of Artificial Sequence: Synthetic oligonucleotide"
cuuuacuuuaaagguucacuuuccuug

SEQ ID NO: 410 - RNA, 27 nt, Artificial Sequence
  source: /note="Description of Artificial Sequence: Synthetic oligonucleotide"
ccaggcuuccagagcaugcagccuccu

SEQ ID NO: 411 - RNA, 27 nt, Artificial Sequence
  source: /note="Description of Artificial Sequence: Synthetic oligonucleotide"
cucucuuuuguuuucuguucagagaaa

SEQ ID NO: 412 - RNA, 27 nt, Artificial Sequence
  source: /note="Description of Artificial Sequence: Synthetic oligonucleotide"
cggcauaacugauuacagccaaguuca

SEQ ID NO: 413 - RNA, 27 nt, Artificial Sequence
  source: /note="Description of Artificial Sequence: Synthetic oligonucleotide"
uggacuucuuuuaauuuuggcuucuuc

SEQ ID NO: 414 - RNA, 27 nt, Artificial Sequence
  source: /note="Description of Artificial Sequence: Synthetic oligonucleotide"
uaaccucaccuggacuucuuuuaauuu

SEQ ID NO: 415 - RNA, 27 nt, Artificial Sequence
  source: /note="Description of Artificial Sequence: Synthetic oligonucleotide"
guccucuucccgauaauccggauucag

SEQ ID NO: 416 - RNA, 27 nt, Artificial Sequence
  source: /note="Description of Artificial Sequence: Synthetic oligonucleotide"
acaauacuugcuuugaugucacauuaa

SEQ ID NO: 417 - RNA, 27 nt, Artificial Sequence
  source: /note="Description of Artificial Sequence: Synthetic oligonucleotide"
gagugcuacaauacuugcuuugauguc

SEQ ID NO: 418 - RNA, 27 nt, Artificial Sequence
  source: /note="Description of Artificial Sequence: Synthetic oligonucleotide"
auuugugguuuuguuuucucucucucu

SEQ ID NO: 419 - RNA, 27 nt, Artificial Sequence
  source: /note="Description of Artificial Sequence: Synthetic oligonucleotide"
uguaugggcuuaaauacuacagcgagg

SEQ ID NO: 420 - RNA, 27 nt, Artificial Sequence
  source: /note="Description of Artificial Sequence: Synthetic oligonucleotide"
cuguaugggcuuaaauacuacagcgag

SEQ ID NO: 421 - RNA, 27 nt, Artificial Sequence
  source: /note="Description of Artificial Sequence: Synthetic oligonucleotide"
ggaagguuucuguaugggcuuaaauac

SEQ ID NO: 422 - RNA, 27 nt, Artificial Sequence
  source: /note="Description of Artificial Sequence: Synthetic oligonucleotide"
guagguauaccauguuuauuuuaauac

SEQ ID NO: 423 - RNA, 27 nt, Artificial Sequence
  source: /note="Description of Artificial Sequence: Synthetic oligonucleotide"
uccgaaaacuggccgaucagaacagcc

SEQ ID NO: 424 - RNA, 27 nt, Artificial Sequence
  source: /note="Description of Artificial Sequence: Synthetic oligonucleotide"
cccuguuccaaaguucaaauuauuugu

SEQ ID NO: 425 - RNA, 27 nt, Artificial Sequence
  source: /note="Description of Artificial Sequence: Synthetic oligonucleotide"
acuggaaaguuaaauuaaggucgcaau

SEQ ID NO: 426 - RNA, 27 nt, Artificial Sequence
  source: /note="Description of Artificial Sequence: Synthetic oligonucleotide"
caaaaccaaacuuuagcuuucucagcc

SEQ ID NO: 427 - RNA, 27 nt, Artificial Sequence
  source: /note="Description of Artificial Sequence: Synthetic oligonucleotide"
uacagugggaaguagcaucuuuacuuu

SEQ ID NO: 428 - RNA, 27 nt, Artificial Sequence
  source: /note="Description of Artificial Sequence: Synthetic oligonucleotide"
ucauaugguaucagcaauuaagcagua

SEQ ID NO: 429 - RNA, 27 nt, Artificial Sequence
  source: /note="Description of Artificial Sequence: Synthetic oligonucleotide"
cagcccauguuucauucauaugguauc

SEQ ID NO: 430 - RNA, 27 nt, Artificial Sequence
  source: /note="Description of Artificial Sequence: Synthetic oligonucleotide"
uaugaaaaaguuggauaagaaaguugg

SEQ ID NO: 431 - RNA, 27 nt, Artificial Sequence
  source: /note="Description of Artificial Sequence: Synthetic oligonucleotide"
uccggccucaugaugucaugcaaggcu

SEQ ID NO: 432 - RNA, 27 nt, Artificial Sequence
  source: /note="Description of Artificial Sequence: Synthetic oligonucleotide"
acaaaugcagucauauacaaauucagg

SEQ ID NO: 433 - RNA, 27 nt, Artificial Sequence
  source: /note="Description of Artificial Sequence: Synthetic oligonucleotide"
gguaguaaacauucuacuaggauucuu

SEQ ID NO: 434 - RNA, 27 nt, Artificial Sequence
  source: /note="Description of Artificial Sequence: Synthetic oligonucleotide"
uuucaucaaaaaauucuucccuuucug

SEQ ID NO: 435 - RNA, 27 nt, Artificial Sequence
  source: /note="Description of Artificial Sequence: Synthetic oligonucleotide"
aaauucacacacuggcaugccgauagc

SEQ ID NO: 436 - RNA, 27 nt, Artificial Sequence
  source: /note="Description of Artificial Sequence: Synthetic oligonucleotide"
acauacauugcucuacuaugaggugaa

SEQ ID NO: 437 - RNA, 27 nt, Artificial Sequence
  source: /note="Description of Artificial Sequence: Synthetic oligonucleotide"
uauauaugugcuuuggcaauucuggug

SEQ ID NO: 438 - RNA, 27 nt, Artificial Sequence
  source: /note="Description of Artificial Sequence: Synthetic oligonucleotide"
ggagaaacuauuacccagaucaccacu

SEQ ID NO: 439 - RNA, 27 nt, Artificial Sequence
  source: /note="Description of Artificial Sequence: Synthetic oligonucleotide"
auuuggagaaacuauuacccagaucac

SEQ ID NO: 440 - RNA, 27 nt, Artificial Sequence
  source: /note="Description of Artificial Sequence: Synthetic oligonucleotide"
uuucuaggaaguauucaucacauccac

SEQ ID NO: 441 - RNA, 27 nt, Artificial Sequence
  source: /note="Description of Artificial Sequence: Synthetic oligonucleotide"
cauauaugguguagcuguggaaaugcg

SEQ ID NO: 442 - RNA, 27 nt, Artificial Sequence
  source: /note="Description of Artificial Sequence: Synthetic oligonucleotide"
cuccauucauauaugguguagcugugg

SEQ ID NO: 443 - RNA, 27 nt, Artificial Sequence
  source: /note="Description of Artificial Sequence: Synthetic oligonucleotide"
aucuucuucucguguaagaacugcagc

SEQ ID NO: 444 - RNA, 27 nt, Artificial Sequence
  source: /note="Description of Artificial Sequence: Synthetic oligonucleotide"
ucccuguaaaugaucuucuucucgugu

SEQ ID NO: 445 - RNA, 27 nt, Artificial Sequence
  source: /note="Description of Artificial Sequence: Synthetic oligonucleotide"
gucccuguaaaugaucuucuucucgug

SEQ ID NO: 446 - RNA, 27 nt, Artificial Sequence
  source: /note="Description of Artificial Sequence: Synthetic oligonucleotide"
ucaggucccuguaaaugaucuucuucu

SEQ ID NO: 447 - RNA, 27 nt, Artificial Sequence
  source: /note="Description of Artificial Sequence: Synthetic oligonucleotide"
gaugcagucaaacaccucuuccucugu

SEQ ID NO: 448 - RNA, 27 nt, Artificial Sequence
  source: /note="Description of Artificial Sequence: Synthetic oligonucleotide"
cgaugcagucaaacaccucuuccucug

SEQ ID NO: 449 - RNA, 27 nt, Artificial Sequence
  source: /note="Description of Artificial Sequence: Synthetic oligonucleotide"
cccugugaacucgcccucaaaguagcg

SEQ ID NO: 450 - RNA, 27 nt, Artificial Sequence
  source: /note="Description of Artificial Sequence: Synthetic oligonucleotide"
ggacagaggugccaggagaugcccuca

SEQ ID NO: 451 - RNA, 27 nt, Artificial Sequence
  source: /note="Description of Artificial Sequence: Synthetic oligonucleotide"
uuaaaaagacaaaccauaucacuccuu

SEQ ID NO: 452 - RNA, 27 nt, Artificial Sequence
  source: /note="Description of Artificial Sequence: Synthetic oligonucleotide"
cuuaaaaagacaaaccauaucacuccu

SEQ ID NO: 453 - RNA, 27 nt, Artificial Sequence
  source: /note="Description of Artificial Sequence: Synthetic oligonucleotide"
gacaaccuuuaggaucuuuacugcaac

SEQ ID NO: 454 - RNA, 27 nt, Artificial Sequence
  source: /note="Description of Artificial Sequence: Synthetic oligonucleotide"
gucgacaaccuuuaggaucuuuacugc

SEQ ID NO: 455 - RNA, 27 nt, Artificial Sequence
  source: /note="Description of Artificial Sequence: Synthetic oligonucleotide"
acaauugccagguuguccuuugucaug

SEQ ID NO: 456 - RNA, 27 nt, Artificial Sequence
  source: /note="Description of Artificial Sequence: Synthetic oligonucleotide"
ccucgcaccacugggucacaauugcca

SEQ ID NO: 457 - RNA, 27 nt, Artificial Sequence
  source: /note="Description of Artificial Sequence: Synthetic oligonucleotide"
auuucaugucucuauggaugauguucu

SEQ ID NO: 458 - RNA, 27 nt, Artificial Sequence
  source: /note="Description of Artificial Sequence: Synthetic oligonucleotide"
uggagaaauauauuguuggauuucaug

SEQ ID NO: 459 - RNA, 27 nt, Artificial Sequence
  source: /note="Description of Artificial Sequence: Synthetic oligonucleotide"
agccuucauggagaaauauauuguugg

SEQ ID NO: 460 - RNA, 27 nt, Artificial Sequence
  source: /note="Description of Artificial Sequence: Synthetic oligonucleotide"
accacuccagcgugacuuuacuguugc

SEQ ID NO: 461 - RNA, 27 nt, Artificial Sequence
  source: /note="Description of Artificial Sequence: Synthetic oligonucleotide"
ccucucuuccuuuacuuucuucacaca

SEQ ID NO: 462 - RNA, 27 nt, Artificial Sequence
  source: /note="Description of Artificial Sequence: Synthetic oligonucleotide"
gcccgaugcaaggauggcucggaagcg

SEQ ID NO: 463 - RNA, 27 nt, Artificial Sequence
  source: /note="Description of Artificial Sequence: Synthetic oligonucleotide"
cacaguaggauauucaaccuccauuuc

SEQ ID NO: 464 - RNA, 27 nt, Artificial Sequence
  source: /note="Description of Artificial Sequence: Synthetic oligonucleotide"
uuacacaguaggauauucaaccuccau

SEQ ID NO: 465 - RNA, 27 nt, Artificial Sequence
  source: /note="Description of Artificial Sequence: Synthetic oligonucleotide"
uacacuacaagggaaaacucaaaaucu

SEQ ID NO: 466 - RNA, 27 nt, Artificial Sequence
  source: /note="Description of Artificial Sequence: Synthetic oligonucleotide"
caaucaacaaagaacaaacaggauaaa

SEQ ID NO: 467 - RNA, 27 nt, Artificial Sequence
  source: /note="Description of Artificial Sequence: Synthetic oligonucleotide"
uuucaaucaacaaagaacaaacaggau

SEQ ID NO: 468 - RNA, 27 nt, Artificial Sequence
  source: /note="Description of Artificial Sequence: Synthetic oligonucleotide"
auggaagaaaaagaaggcuguagagaa

SEQ ID NO: 469 - RNA, 27 nt, Artificial Sequence
  source: /note="Description of Artificial Sequence: Synthetic oligonucleotide"
uagaaggaagauuagcuauggaagaaa

SEQ ID NO: 470 - RNA, 27 nt, Artificial Sequence
  source: /note="Description of Artificial Sequence: Synthetic oligonucleotide"
augaagcauucaacaggaagauuauuu

SEQ ID NO: 471 - RNA, 27 nt, Artificial Sequence
  source: /note="Description of Artificial Sequence: Synthetic oligonucleotide"
caugaagcauucaacaggaagauuauu

SEQ ID NO: 472 - RNA, 27 nt, Artificial Sequence
  source: /note="Description of Artificial Sequence: Synthetic oligonucleotide"
ucaaaguagaauucaagucaugaagca

SEQ ID NO: 473 - RNA, 27 nt, Artificial Sequence
  source: /note="Description of Artificial Sequence: Synthetic oligonucleotide"
gucuguaguugcuucucucccucuuag

SEQ ID NO: 474 - RNA, 27 nt, Artificial Sequence
  source: /note="Description of Artificial Sequence: Synthetic oligonucleotide"
guugaccuuggucugguaggagacggc

SEQ ID NO: 475 - RNA, 27 nt, Artificial Sequence
  source: /note="Description of Artificial Sequence: Synthetic oligonucleotide"
gucgagauagucgggccgauugaucuc

SEQ ID NO: 476 - RNA, 27 nt, Artificial Sequence
  source: /note="Description of Artificial Sequence: Synthetic oligonucleotide"
guuugggaagguuggauguucguccuc

SEQ ID NO: 477 - RNA, 27 nt, Artificial Sequence
  source: /note="Description of Artificial Sequence: Synthetic oligonucleotide"
aguucuaagcuuggguuccgacccuaa

SEQ ID NO: 478 - RNA, 27 nt, Artificial Sequence
  source: /note="Description of Artificial Sequence: Synthetic oligonucleotide"
uuaaaguucuaagcuuggguuccgacc

SEQ ID NO: 479 - RNA, 27 nt, Artificial Sequence
  source: /note="Description of Artificial Sequence: Synthetic oligonucleotide"
guugcuuaaaguucuaagcuuggguuc

SEQ ID NO: 480 - RNA, 27 nt, Artificial Sequence
  source: /note="Description of Artificial Sequence: Synthetic oligonucleotide"
gugguggucuuguugcuuaaaguucua

SEQ ID NO: 481 - RNA, 27 nt, Artificial Sequence
  source: /note="Description of Artificial Sequence: Synthetic oligonucleotide"
acuuuauuucucgccacugaauaguag

SEQ ID NO: 482 - RNA, 27 nt, Artificial Sequence
  source: /note="Description of Artificial Sequence: Synthetic oligonucleotide"
aacuuuauuucucgccacugaauagua

SEQ ID NO: 483 - RNA, 27 nt, Artificial Sequence
  source: /note="Description of Artificial Sequence: Synthetic oligonucleotide"
ggaucauuuccuguuaucuguguuugu

SEQ ID NO: 484 - RNA, 27 nt, Artificial Sequence
  source: /note="Description of Artificial Sequence: Synthetic oligonucleotide"
guuucauuucuucucuuuucuuaaggc

SEQ ID NO: 485 - RNA, 27 nt, Artificial Sequence
  source: /note="Description of Artificial Sequence: Synthetic oligonucleotide"
ggaggauggaaacacacuccuucaguu

SEQ ID NO: 486 - RNA, 27 nt, Artificial Sequence
  source: /note="Description of Artificial Sequence: Synthetic oligonucleotide"
ucaaagauuuucagucccgcggugaca

SEQ ID NO: 487 - RNA, 27 nt, Artificial Sequence
  source: /note="Description of Artificial Sequence: Synthetic oligonucleotide"
ccugaacggcacgcuuauuucugcugu

SEQ ID NO: 488 - RNA, 27 nt, Artificial Sequence
  source: /note="Description of Artificial Sequence: Synthetic oligonucleotide"
cuucuggacccugaacggcacgcuuau

SEQ ID NO: 489 - RNA, 27 nt, Artificial Sequence
  source: /note="Description of Artificial Sequence: Synthetic oligonucleotide"
caagcagucuugagugacuguuucuuc

SEQ ID NO: 490 - RNA, 27 nt, Artificial Sequence
  source: /note="Description of Artificial Sequence: Synthetic oligonucleotide"
ccaaagacauggaccuucuuccucuga

SEQ ID NO: 491 - RNA, 27 nt, Artificial Sequence
  source: /note="Description of Artificial Sequence: Synthetic oligonucleotide"
guguuucaggcauauuuugaauacauc

SEQ ID NO: 492 - RNA, 27 nt, Artificial Sequence
  source: /note="Description of Artificial Sequence: Synthetic oligonucleotide"
gagguacagagaaagggaggaaaauag

SEQ ID NO: 493 - RNA, 27 nt, Artificial Sequence
  source: /note="Description of Artificial Sequence: Synthetic oligonucleotide"
ucuugucuugcucuaucuuucuuuggu

SEQ ID NO: 494 - RNA, 27 nt, Artificial Sequence
  source: /note="Description of Artificial Sequence: Synthetic oligonucleotide"
uuucuugucuugcucuaucuuucuuug

SEQ ID NO: 495 - RNA, 27 nt, Artificial Sequence
  source: /note="Description of Artificial Sequence: Synthetic oligonucleotide"
ggaucuuguacaaacaaaugcuuucuc

SEQ ID NO: 496 - RNA, 27 nt, Artificial Sequence
  source: /note="Description of Artificial Sequence: Synthetic oligonucleotide"
ucugcaaguacguucguuuaacucaag

SEQ ID NO: 497 - RNA, 27 nt, Artificial Sequence
  source: /note="Description of Artificial Sequence: Synthetic oligonucleotide"
ucuguaucgaucguucuguaucagucu

SEQ ID NO: 498 - RNA, 27 nt, Artificial Sequence
  source: /note="Description of Artificial Sequence: Synthetic oligonucleotide"
auuuauuuuuauauauauauaauauau

SEQ ID NO: 499 - RNA, 27 nt, Artificial Sequence
  source: /note="Description of Artificial Sequence: Synthetic oligonucleotide"
auauuuauuuuuauauauauauaauau

SEQ ID NO: 500 - RNA, 27 nt, Artificial Sequence
  source: /note="Description of Artificial Sequence: Synthetic oligonucleotide"
cacagcagucaaauacauccagugaag

SEQ ID NO: 501 - RNA, 27 nt, Artificial Sequence
  source: /note="Description of Artificial Sequence: Synthetic oligonucleotide"
gucucucaucuccuccucuucccuguc

SEQ ID NO: 502 - RNA, 27 nt, Artificial Sequence
  source: /note="Description of Artificial Sequence: Synthetic oligonucleotide"
ccaagugggacaaaaaaaagaucaugc

SEQ ID NO: 503 - RNA, 14 nt, Artificial Sequence
  source: /note="Description of Artificial Sequence: Synthetic oligonucleotide"
guauuuugaugagg

SEQ ID NO: 504 - RNA, 12 nt, Artificial Sequence
  source: /note="Description of Artificial Sequence: Synthetic oligonucleotide"
ggcccagaugau

SEQ ID NO: 505 - RNA, 14 nt, Artificial Sequence
  source: /note="Description of Artificial Sequence: Synthetic oligonucleotide"
gggaagaaaacuau

SEQ ID NO: 506 - RNA, 15 nt, Artificial Sequence
  source: /note="Description of Artificial Sequence: Synthetic oligonucleotide"
guuuuaauuuauuuc

SEQ ID NO: 507 - RNA, 12 nt, Artificial Sequence
  source: /note="Description of Artificial Sequence: Synthetic oligonucleotide"
acguagggaaau

SEQ ID NO: 508 - RNA, 12 nt, Artificial Sequence
  source: /note="Description of Artificial Sequence: Synthetic oligonucleotide"
ccaggguuuacc

SEQ ID NO: 509 - RNA, 11 nt, Artificial Sequence
  source: /note="Description of Artificial Sequence: Synthetic oligonucleotide"
agcaagguuua

SEQ ID NO: 510 - RNA, 12 nt, Artificial Sequence
  source: /note="Description of Artificial Sequence: Synthetic oligonucleotide"
uguauuauguug

SEQ ID NO: 511 - RNA, 15 nt, Artificial Sequence
  source: /note="Description of Artificial Sequence: Synthetic oligonucleotide"
uuuuaaucuuuguga

SEQ ID NO: 512 - RNA, 14 nt, Artificial Sequence
  source: /note="Description of Artificial Sequence: Synthetic oligonucleotide"
uuaaucuuugugac

SEQ ID NO: 513 - RNA, 13 nt, Artificial Sequence
  source: /note="Description of Artificial Sequence: Synthetic oligonucleotide"
gcugcuuaugucu

SEQ ID NO: 514 - RNA, 14 nt, Artificial Sequence
  source: /note="Description of Artificial Sequence: Synthetic oligonucleotide"
aaguguuucagaag

SEQ ID NO: 515 - RNA, 13 nt, Artificial Sequence
  source: /note="Description of Artificial Sequence: Synthetic oligonucleotide"
gaccaucaauaag

SEQ ID NO: 516 - RNA, 13 nt, Artificial Sequence
  source: /note="Description of Artificial Sequence: Synthetic oligonucleotide"
ccaucaauaagga

SEQ ID NO: 517 - RNA, 14 nt, Artificial Sequence
  source: /note="Description of Artificial Sequence: Synthetic oligonucleotide"
ucaauaaggaagaa

SEQ ID NO: 518 - RNA, 14 nt, Artificial Sequence
  source: /note="Description of Artificial Sequence: Synthetic oligonucleotide"
aauaaggaagaagc

SEQ ID NO: 519 - RNA, 13 nt, Artificial Sequence
  source: /note="Description of Artificial Sequence: Synthetic oligonucleotide"
aggaagaagcccu

SEQ ID NO: 520 - RNA, 13 nt, Artificial Sequence
  source: /note="Description of Artificial Sequence: Synthetic oligonucleotide"
gcauaacuaaagg

SEQ ID NO: 521 - RNA, 14 nt, Artificial Sequence
  source: /note="Description of Artificial Sequence: Synthetic oligonucleotide"
cauaacuaaaggug

SEQ ID NO: 522 - RNA, 12 nt, Artificial Sequence
  source: /note="Description of Artificial Sequence: Synthetic oligonucleotide"
cuacaucacgcc

SEQ ID NO: 523 - RNA, 12 nt, Artificial Sequence
  source: /note="Description of Artificial Sequence: Synthetic oligonucleotide"
acuggauuuaag

SEQ ID NO: 524 - RNA, 12 nt, Artificial Sequence
  source: /note="Description of Artificial Sequence: Synthetic oligonucleotide"
cuggauuuaagc

SEQ ID NO: 525 - RNA, 13 nt, Artificial Sequence
  source: /note="Description of Artificial Sequence: Synthetic oligonucleotide"
gauuuaagcagag

SEQ ID NO: 526 - RNA, 13 nt, Artificial Sequence
  source: /note="Description of Artificial Sequence: Synthetic oligonucleotide"
auuuaagcagagu

SEQ ID NO: 527 - RNA, 13 nt, Artificial Sequence
  source: /note="Description of Artificial Sequence: Synthetic oligonucleotide"
uuaagcagaguuc

SEQ ID NO: 528 - RNA, 13 nt, Artificial Sequence
  source: /note="Description of Artificial Sequence: Synthetic oligonucleotide"
uaagcagaguuca

SEQ ID NO: 529 - RNA, 14 nt, Artificial Sequence
  source: /note="Description of Artificial Sequence: Synthetic oligonucleotide"
agcagaguucaaaa

SEQ ID NO: 530 - RNA, 12 nt, Artificial Sequence
  source: /note="Description of Artificial Sequence: Synthetic oligonucleotide"
cucagggucuga

SEQ ID NO: 531 - RNA, 13 nt, Artificial Sequence
  source: /note="Description of Artificial Sequence: Synthetic oligonucleotide"
caagcaacuacau

SEQ ID NO: 532 - RNA, 12 nt, Artificial Sequence
  source: /note="Description of Artificial Sequence: Synthetic oligonucleotide"
aucaauggcagc

SEQ ID NO: 533 - RNA, 11 nt, Artificial Sequence
  source: /note="Description of Artificial Sequence: Synthetic oligonucleotide"
uuccagcccac

SEQ ID NO: 534 - RNA, 12 nt, Artificial Sequence
  source: /note="Description of Artificial Sequence: Synthetic oligonucleotide"
cagcugagaaug

SEQ ID NO: 535 - RNA, 13 nt, Artificial Sequence
  source: /note="Description of Artificial Sequence: Synthetic oligonucleotide"
aacguaucuccua

SEQ ID NO: 536 - RNA, 14 nt, Artificial Sequence
  source: /note="Description of Artificial Sequence: Synthetic oligonucleotide"
ccuaaaauaauuuc

SEQ ID NO: 537 - RNA, 13 nt, Artificial Sequence
  source: /note="Description of Artificial Sequence: Synthetic oligonucleotide"
uggaagauucagc

SEQ ID NO: 538 - RNA, 12 nt, Artificial Sequence
  source: /note="Description of Artificial Sequence: Synthetic oligonucleotide"
uuaaacucuccu

SEQ ID NO: 539 - RNA, 12 nt, Artificial Sequence
  source: /note="Description of Artificial Sequence: Synthetic oligonucleotide"
cagccuacaguu

SEQ ID NO: 540 - RNA, 13 nt, Artificial Sequence
  source: /note="Description of Artificial Sequence: Synthetic oligonucleotide"
guuauguucaguc

SEQ ID NO: 541 - RNA, 13 nt, Artificial Sequence
  source: /note="Description of Artificial Sequence: Synthetic oligonucleotide"
cacauacaaaaug

SEQ ID NO: 542 - RNA, 9 nt, Artificial Sequence
  source: /note="Description of Artificial Sequence: Synthetic oligonucleotide"
uccuuuugc

SEQ ID NO: 543 - RNA, 12 nt, Artificial Sequence
  source: /note="Description of Artificial Sequence: Synthetic oligonucleotide"
ugaccugugaag

SEQ ID NO: 544 - RNA, 12 nt, Artificial Sequence
  source: /note="Description of Artificial Sequence: Synthetic oligonucleotide"
cuaucucacaca

SEQ ID NO: 545 - RNA, 13 nt, Artificial Sequence
  source: /note="Description of Artificial Sequence: Synthetic oligonucleotide"
uguccucaauugu

SEQ ID NO: 546 - RNA, 12 nt, Artificial Sequence
  source: /note="Description of Artificial Sequence: Synthetic oligonucleotide"
aaaccguagcug

SEQ ID NO: 547 - RNA, 12 nt, Artificial Sequence
  source: /note="Description of Artificial Sequence: Synthetic oligonucleotide"
uagcuggcaagc

SEQ ID NO: 548 - RNA, 14 nt, Artificial Sequence
  source: /note="Description of Artificial Sequence: Synthetic oligonucleotide"
uuguaugguuaaaa

SEQ ID NO: 549 - RNA, 14 nt, Artificial Sequence
  source: /note="Description of Artificial Sequence: Synthetic oligonucleotide"
ugguuaaaagaugg

SEQ ID NO: 550 - RNA, 13 nt, Artificial Sequence
  source: /note="Description of Artificial Sequence: Synthetic oligonucleotide"
cagggaauuauac

SEQ ID NO: 551 - RNA, 12 nt, Artificial Sequence
  source: /note="Description of Artificial Sequence: Synthetic oligonucleotide"
acaaucuugcug

SEQ ID NO: 552 - RNA, 13 nt, Artificial Sequence
  source: /note="Description of Artificial Sequence: Synthetic oligonucleotide"
ccaauaaugaaga

SEQ ID NO: 553 - RNA, 13 nt, Artificial Sequence
  source: /note="Description of Artificial Sequence: Synthetic oligonucleotide"
acuuuggauguuc

SEQ ID NO: 554 - RNA, 12 nt, Artificial Sequence
  source: /note="Description of Artificial Sequence: Synthetic oligonucleotide"
aaugcuuccacu

SEQ ID NO: 555 - RNA, 11 nt, Artificial Sequence
  source: /note="Description of Artificial Sequence: Synthetic oligonucleotide"
gagaaaguuug

SEQ ID NO: 556 - RNA, 11 nt, Artificial Sequence
  source: /note="Description of Artificial Sequence: Synthetic oligonucleotide"
aaagaacuacu

SEQ ID NO: 557 - RNA, 12 nt, Artificial Sequence
  source: /note="Description of Artificial Sequence: Synthetic oligonucleotide"
uuagaaauacgg

SEQ ID NO: 558 - RNA, 12 nt, Artificial Sequence
  source: /note="Description of Artificial Sequence: Synthetic oligonucleotide"
aacauggguaca

SEQ ID NO: 559 - RNA, 14 nt, Artificial Sequence
  source: /note="Description of Artificial Sequence: Synthetic oligonucleotide"
aaagacacagaaga

SEQ ID NO: 560 - RNA, 11 nt, Artificial Sequence
  source: /note="Description of Artificial Sequence: Synthetic oligonucleotide"
uaguagggagg

SEQ ID NO: 561 - RNA, 12 nt, Artificial Sequence
  source: /note="Description of Artificial Sequence: Synthetic oligonucleotide"
gccuucugcagc

SEQ ID NO: 562 - RNA, 10 nt, Artificial Sequence
  source: /note="Description of Artificial Sequence: Synthetic oligonucleotide"
ggucugguac

SEQ ID NO: 563 - RNA, 12 nt, Artificial Sequence
  source: /note="Description of Artificial Sequence: Synthetic oligonucleotide"
cuaguccuuccg

SEQ ID NO: 564 - RNA, 12 nt, Artificial Sequence
  source: /note="Description of Artificial Sequence: Synthetic oligonucleotide"
ccagugaauauu

SEQ ID NO: 565 - RNA, 13 nt, Artificial Sequence
  source: /note="Description of Artificial Sequence: Synthetic oligonucleotide"
augaauucaaguu

SEQ ID NO: 566 - RNA, 12 nt, Artificial Sequence
  source: /note="Description of Artificial Sequence: Synthetic oligonucleotide"
caggacacagau

SEQ ID NO: 567 - RNA, 12 nt, Artificial Sequence
  source: /note="Description of Artificial Sequence: Synthetic oligonucleotide"
cucaaagcacag

SEQ ID NO: 568 - RNA, 10 nt, Artificial Sequence
  source: /note="Description of Artificial Sequence: Synthetic oligonucleotide"
accacugcca

SEQ ID NO: 569 - RNA, 13 nt, Artificial Sequence
  source: /note="Description of Artificial Sequence: Synthetic oligonucleotide"
gaaacuacuagug

SEQ ID NO: 570 - RNA, 12 nt, Artificial Sequence
  source: /note="Description of Artificial Sequence: Synthetic oligonucleotide"
aagucggacagc

SEQ ID NO: 571 - RNA, 13 nt, Artificial Sequence
  source: /note="Description of Artificial Sequence: Synthetic oligonucleotide"
gaaagcgaaaaau

SEQ ID NO: 572 - RNA, 13 nt, Artificial Sequence
  source: /note="Description of Artificial Sequence: Synthetic oligonucleotide"
cccucugauuuag

SEQ ID NO: 573 - RNA, 12 nt, Artificial Sequence
  source: /note="Description of Artificial Sequence: Synthetic oligonucleotide"
ugagcuauuuaa

SEQ ID NO: 574 - RNA, 13 nt, Artificial Sequence
  source: /note="Description of Artificial Sequence: Synthetic oligonucleotide"
aaaaggugaaaaa

SEQ ID NO: 575 - RNA, 14 nt, Artificial Sequence
  source: /note="Description of Artificial Sequence: Synthetic oligonucleotide"
gaaaaagcacuauu

SEQ ID NO: 576 - RNA, 12 nt, Artificial Sequence
  source: /note="Description of Artificial Sequence: Synthetic oligonucleotide"
ggcugaaaagaa

SEQ ID NO: 577 - RNA, 12 nt, Artificial Sequence
  source: /note="Description of Artificial Sequence: Synthetic oligonucleotide"
uaaacccuuaua

SEQ ID NO: 578 - RNA, 13 nt, Artificial Sequence
  source: /note="Description of Artificial Sequence: Synthetic oligonucleotide"
cauacuauuagcc

SEQ ID NO: 579 - RNA, 12 nt, Artificial Sequence
  source: /note="Description of Artificial Sequence: Synthetic oligonucleotide"
gacagaagcauu

SEQ ID NO: 580 - RNA, 14 nt, Artificial Sequence
  source: /note="Description of Artificial Sequence: Synthetic oligonucleotide"
agagcaaauaagau

SEQ ID NO: 581 - RNA, 14 nt, Artificial Sequence
  source: /note="Description of Artificial Sequence: Synthetic oligonucleotide"
ccaacauuuuucuc

SEQ ID NO: 582 - RNA, 15 nt, Artificial Sequence
  source: /note="Description of Artificial Sequence: Synthetic oligonucleotide"
uuaaguaugagaaaa

SEQ ID NO: 583 - RNA, 14 nt, Artificial Sequence
  source: /note="Description of Artificial Sequence: Synthetic oligonucleotide"
caggaauaaagaug

SEQ ID NO: 584 - RNA, 13 nt, Artificial Sequence
  source: /note="Description of Artificial Sequence: Synthetic oligonucleotide"
aauuugaaugacc

SEQ ID NO: 585 - RNA, 14 nt, Artificial Sequence
  source: /note="Description of Artificial Sequence: Synthetic oligonucleotide"
auguauaaagauag

SEQ ID NO: 586 - RNA, 12 nt, Artificial Sequence
  source: /note="Description of Artificial Sequence: Synthetic oligonucleotide"
ggcuguaacuau

SEQ ID NO: 587 - RNA, 11 nt, Artificial Sequence
  source: /note="Description of Artificial Sequence: Synthetic oligonucleotide"
ucugugaagug

SEQ ID NO: 588 - RNA, 14 nt, Artificial Sequence
  source: /note="Description of Artificial Sequence: Synthetic oligonucleotide"
ccuuuaaggaaaug

SEQ ID NO: 589 - RNA, 13 nt, Artificial Sequence
  source: /note="Description of Artificial Sequence: Synthetic oligonucleotide"
aaggauacaaaaa

SEQ ID NO: 590 - RNA, 12 nt, Artificial Sequence
  source: /note="Description of Artificial Sequence: Synthetic oligonucleotide"
agaugcaauuug

SEQ ID NO: 591 - RNA, 12 nt, Artificial Sequence
  source: /note="Description of Artificial Sequence: Synthetic oligonucleotide"
guucaaaacgaa

SEQ ID NO: 592 - RNA, 11 nt, Artificial Sequence
  source: /note="Description of Artificial Sequence: Synthetic oligonucleotide"
gugaaaccuca

SEQ ID NO: 593 - RNA, 13 nt, Artificial Sequence
  source: /note="Description of Artificial Sequence: Synthetic oligonucleotide"
acgaaagagaagc

SEQ ID NO: 594 - RNA, 12 nt, Artificial Sequence
  source: /note="Description of Artificial Sequence: Synthetic oligonucleotide"
cuccacaagcgc

SEQ ID NO: 595 - RNA, 14 nt, Artificial Sequence
  source: /note="Description of Artificial Sequence: Synthetic oligonucleotide"
gagaagauuccaaa

SEQ ID NO: 596 - RNA, 13 nt, Artificial Sequence
  source: /note="Description of Artificial Sequence: Synthetic oligonucleotide"
aaucuggauucaa

SEQ ID NO: 597 - RNA, 13 nt, Artificial Sequence
  source: /note="Description of Artificial Sequence: Synthetic oligonucleotide"
agaacagauuuga

SEQ ID NO: 598 - RNA, 11 nt, Artificial Sequence
  source: /note="Description of Artificial Sequence: Synthetic oligonucleotide"
ccagagcugug

SEQ ID NO: 599 - RNA, 12 nt, Artificial Sequence
  source: /note="Description of Artificial Sequence: Synthetic oligonucleotide"
ccucagauuguu

SEQ ID NO: 600 - RNA, 12 nt, Artificial Sequence
  source: /note="Description of Artificial Sequence: Synthetic oligonucleotide"
cuauuuuaauua

SEQ ID NO: 601 - RNA, 13 nt, Artificial Sequence
  source: /note="Description of Artificial Sequence: Synthetic oligonucleotide"
uuuaauuuauuaa

SEQ ID NO: 602 - RNA, 12 nt, Artificial Sequence
  source: /note="Description of Artificial Sequence: Synthetic oligonucleotide"
augcaguuugaa

SEQ ID NO: 603 - RNA, 11 nt, Artificial Sequence
  source: /note="Description of Artificial Sequence: Synthetic oligonucleotide"
caugcugcugg

SEQ ID NO: 604 - RNA, 13 nt, Artificial Sequence
  source: /note="Description of Artificial Sequence: Synthetic oligonucleotide"
agaugugcauuuc

SEQ ID NO: 605 - RNA, 12 nt, Artificial Sequence
  source: /note="Description of Artificial Sequence: Synthetic oligonucleotide"
ucaaaaccugug

SEQ ID NO: 606 - RNA, 11 nt, Artificial Sequence
  source: /note="Description of Artificial Sequence: Synthetic oligonucleotide"
gaaugugggua

SEQ ID NO: 607 - RNA, 10 nt, Artificial Sequence
  source: /note="Description of Artificial Sequence: Synthetic oligonucleotide"
auguggguag

SEQ ID NO: 608 - RNA, 13 nt, Artificial Sequence
  source: /note="Description of Artificial Sequence: Synthetic oligonucleotide"
ugaaaaugagcau

SEQ ID NO: 609 - RNA, 13 nt, Artificial Sequence
  source: /note="Description of Artificial Sequence: Synthetic oligonucleotide"
uugcuuuucaugu

SEQ ID NO: 610 - RNA, 12 nt, Artificial Sequence
  source: /note="Description of Artificial Sequence: Synthetic oligonucleotide"
uguauuucuaua

SEQ ID NO: 611 - RNA, 13 nt, Artificial Sequence
  source: /note="Description of Artificial Sequence: Synthetic oligonucleotide"
uuugauuaauguu

SEQ ID NO: 612 - RNA, 12 nt, Artificial Sequence
  source: /note="Description of Artificial Sequence: Synthetic oligonucleotide"
caacguguauag

SEQ ID NO: 613 - RNA, 12 nt, Artificial Sequence
  source: /note="Description of Artificial Sequence: Synthetic oligonucleotide"
cauauccuuggc

SEQ ID NO: 614 - RNA, 13 nt, Artificial Sequence
  source: /note="Description of Artificial Sequence: Synthetic oligonucleotide"
uacuaacaucugg

SEQ ID NO: 615 - RNA, 11 nt, Artificial Sequence
  source: /note="Description of Artificial Sequence: Synthetic oligonucleotide"
cauaaguugug

SEQ ID NO: 616 - RNA, 12 nt, Artificial Sequence
  source: /note="Description of Artificial Sequence: Synthetic oligonucleotide"
gcaucauuuugg

SEQ ID NO: 617 - RNA, 10 nt, Artificial Sequence
  source: /note="Description of Artificial Sequence: Synthetic oligonucleotide"
gcucuucuua

SEQ ID NO: 618 - RNA, 10 nt, Artificial Sequence
  source: /note="Description of Artificial Sequence: Synthetic oligonucleotide"
agauuagguc

SEQ ID NO: 619 - RNA, 12 nt, Artificial Sequence
  source: /note="Description of Artificial Sequence: Synthetic oligonucleotide"
auggaauugaaa

SEQ ID NO: 620 - RNA, 13 nt, Artificial Sequence
  source: /note="Description of Artificial Sequence: Synthetic oligonucleotide"
cacacucauuccu

SEQ ID NO: 621 - RNA, 12 nt, Artificial Sequence
  source: /note="Description of Artificial Sequence: Synthetic oligonucleotide"
uguagagguaac

SEQ ID NO: 622 - RNA, 11 nt, Artificial Sequence
  source: /note="Description of Artificial Sequence: Synthetic oligonucleotide"
caaccacaugc

SEQ ID NO: 623 - RNA, 12 nt, Artificial Sequence
  source: /note="Description of Artificial Sequence: Synthetic oligonucleotide"
ucggaaacaagu

SEQ ID NO: 624 - RNA, 11 nt, Artificial Sequence
  source: /note="Description of Artificial Sequence: Synthetic oligonucleotide"
acucccaauaa

SEQ ID NO: 625 - RNA, 13 nt, Artificial Sequence
  source: /note="Description of Artificial Sequence: Synthetic oligonucleotide"
aaugcuaagaaau

SEQ ID NO: 626 - RNA, 11 nt, Artificial Sequence
  source: /note="Description of Artificial Sequence: Synthetic oligonucleotide"
gucuuucucua

SEQ ID NO: 627 - RNA, 11 nt, Artificial Sequence
  source: /note="Description of Artificial Sequence: Synthetic oligonucleotide"
ugaauuucagg

SEQ ID NO: 628 - RNA, 13 nt, Artificial Sequence
  source: /note="Description of Artificial Sequence: Synthetic oligonucleotide"
cgauucccucuca

SEQ ID NO: 629 - RNA, 11 nt, Artificial Sequence
  source: /note="Description of Artificial Sequence: Synthetic oligonucleotide"
aggaaagugaa

SEQ ID NO: 630 - RNA, 12 nt, Artificial Sequence
  source: /note="Description of Artificial Sequence: Synthetic oligonucleotide"
gaggcugcaugc

SEQ ID NO: 631 - RNA, 11 nt, Artificial Sequence
  source: /note="Description of Artificial Sequence: Synthetic oligonucleotide"
ucucugaacag

SEQ ID NO: 632 - RNA, 12 nt, Artificial Sequence
  source: /note="Description of Artificial Sequence: Synthetic oligonucleotide"
aacuuggcugua

SEQ ID NO: 633 - RNA, 12 nt, Artificial Sequence
  source: /note="Description of Artificial Sequence: Synthetic oligonucleotide"
agaagccaaaau

SEQ ID NO: 634 - RNA, 14 nt, Artificial Sequence
  source: /note="Description of Artificial Sequence: Synthetic oligonucleotide"
auuaaaagaagucc

SEQ ID NO: 635 - RNA, 14 nt, Artificial Sequence
  source: /note="Description of Artificial Sequence: Synthetic oligonucleotide"
gaauccggauuauc

SEQ ID NO: 636 - RNA, 12 nt, Artificial Sequence
  source: /note="Description of Artificial Sequence: Synthetic oligonucleotide"
aaugugacauca

SEQ ID NO: 637 - RNA, 13 nt, Artificial Sequence
  source: /note="Description of Artificial Sequence: Synthetic oligonucleotide"
caucaaagcaagu

SEQ ID NO: 638 - RNA, 11 nt, Artificial Sequence
  source: /note="Description of Artificial Sequence: Synthetic oligonucleotide"
agagagagaaa

SEQ ID NO: 639 - RNA, 13 nt, Artificial Sequence
  source: /note="Description of Artificial Sequence: Synthetic oligonucleotide"
ucgcuguaguauu

SEQ ID NO: 640 - RNA, 14 nt, Artificial Sequence
  source: /note="Description of Artificial Sequence: Synthetic oligonucleotide"
cgcuguaguauuua

SEQ ID NO: 641 - RNA, 13 nt, Artificial Sequence
  source: /note="Description of Artificial Sequence: Synthetic oligonucleotide"
auuuaagcccaua

SEQ ID NO: 642 - RNA, 15 nt, Artificial Sequence
  source: /note="Description of Artificial Sequence: Synthetic oligonucleotide"
auuaaaauaaacaug

SEQ ID NO: 643 - RNA, 12 nt, Artificial Sequence
  source: /note="Description of Artificial Sequence: Synthetic oligonucleotide"
cuguucugaucg

SEQ ID NO: 644 - RNA, 16 nt, Artificial Sequence
  source: /note="Description of Artificial Sequence: Synthetic oligonucleotide"
aaauaauuugaacuuu

SEQ ID NO: 645 - RNA, 12 nt, Artificial Sequence
  source: /note="Description of Artificial Sequence: Synthetic oligonucleotide"
ugcgaccuuaau

SEQ ID NO: 646 - RNA, 11 nt, Artificial Sequence
  source: /note="Description of Artificial Sequence: Synthetic oligonucleotide"
cugagaaagcu

SEQ ID NO: 647 - RNA, 13 nt, Artificial Sequence
  source: /note="Description of Artificial Sequence: Synthetic oligonucleotide"
aguaaagaugcua

SEQ ID NO: 648 - RNA, 12 nt, Artificial Sequence
  source: /note="Description of Artificial Sequence: Synthetic oligonucleotide"
cugcuuaauugc

SEQ ID NO: 649 - RNA, 14 nt, Artificial Sequence
  source: /note="Description of Artificial Sequence: Synthetic oligonucleotide"
uaccauaugaauga

SEQ ID NO: 650 - RNA, 12 nt, Artificial Sequence
  source: /note="Description of Artificial Sequence: Synthetic oligonucleotide"
aacuuucuuauc

SEQ ID NO: 651 - RNA, 13 nt, Artificial Sequence
  source: /note="Description of Artificial Sequence: Synthetic oligonucleotide"
ccuugcaugacau

SEQ ID NO: 652 - RNA, 14 nt, Artificial Sequence
  source: /note="Description of Artificial Sequence: Synthetic oligonucleotide"
ugaauuuguauaug

SEQ ID NO: 653 - RNA, 12 nt, Artificial Sequence
  source: /note="Description of Artificial Sequence: Synthetic oligonucleotide"
gaauccuaguag

SEQ ID NO: 654 - RNA, 10 nt, Artificial Sequence
  source: /note="Description of Artificial Sequence: Synthetic oligonucleotide"
gaaagggaag

SEQ ID NO: 655 - RNA, 11 nt, Artificial Sequence
  source: /note="Description of Artificial Sequence: Synthetic oligonucleotide"
uaucggcaugc

SEQ ID NO: 656 - RNA, 12 nt, Artificial Sequence
  source: /note="Description of Artificial Sequence: Synthetic oligonucleotide"
caccucauagua

SEQ ID NO: 657 - RNA, 11 nt, Artificial Sequence
  source: /note="Description of Artificial Sequence: Synthetic oligonucleotide"
ccagaauugcc

SEQ ID NO: 658 - RNA, 11 nt, Artificial Sequence
  source: /note="Description of Artificial Sequence: Synthetic oligonucleotide"
uggugaucugg

SEQ ID NO: 659 - RNA, 12 nt, Artificial Sequence
  source: /note="Description of Artificial Sequence: Synthetic oligonucleotide"
gaucuggguaau

SEQ ID NO: 660 - RNA, 12 nt, Artificial Sequence
  source: /note="Description of Artificial Sequence: Synthetic oligonucleotide"
ggaugugaugaa

SEQ ID NO: 661 - RNA, 12 nt, Artificial Sequence
  source: /note="Description of Artificial Sequence: Synthetic oligonucleotide"
cauuuccacagc

SEQ ID NO: 662 - RNA, 11 nt, Artificial Sequence
  source: /note="Description of Artificial Sequence: Synthetic oligonucleotide"
acagcuacacc

SEQ ID NO: 663 - RNA, 12 nt, Artificial Sequence
  source: /note="Description of Artificial Sequence: Synthetic oligonucleotide"
ugcaguucuuac

SEQ ID NO: 664 - RNA, 12 nt, Artificial Sequence
  source: /note="Description of Artificial Sequence: Synthetic oligonucleotide"
acgagaagaaga

SEQ ID NO: 665 - RNA, 12 nt, Artificial Sequence
  source: /note="Description of Artificial Sequence: Synthetic oligonucleotide"
cgagaagaagau

SEQ ID NO: 666 - RNA, 15 nt, Artificial Sequence
  source: /note="Description of Artificial Sequence: Synthetic oligonucleotide"
aagaagaucauuuac

SEQ ID NO: 667 - RNA, 11 nt, Artificial Sequence
  source: /note="Description of Artificial Sequence: Synthetic oligonucleotide"
agaggaagagg

SEQ ID NO: 668 - RNA, 12 nt, Artificial Sequence
  source: /note="Description of Artificial Sequence: Synthetic oligonucleotide"
gaggaagaggug

SEQ ID NO: 669 - RNA, 13 nt, Artificial Sequence
  source: /note="Description of Artificial Sequence: Synthetic oligonucleotide"
cuacuuugagggc

SEQ ID NO: 670 - RNA, 12 nt, Artificial Sequence
  source: /note="Description of Artificial Sequence: Synthetic oligonucleotide"
agggcaucuccu

SEQ ID NO: 671 - RNA, 10 nt, Artificial Sequence
  source: /note="Description of Artificial Sequence: Synthetic oligonucleotide"
ggagugauau

SEQ ID NO: 672 - RNA, 11 nt, Artificial Sequence
  source: /note="Description of Artificial Sequence: Synthetic oligonucleotide"
gagugauaugg

SEQ ID NO: 673 - RNA, 12 nt, Artificial Sequence
  source: /note="Description of Artificial Sequence: Synthetic oligonucleotide"
ugcaguaaagau

SEQ ID NO: 674 - RNA, 13 nt, Artificial Sequence
  source: /note="Description of Artificial Sequence: Synthetic oligonucleotide"
aguaaagauccua

SEQ ID NO: 675 - RNA, 12 nt, Artificial Sequence
  source: /note="Description of Artificial Sequence: Synthetic oligonucleotide"
ugacaaaggaca

SEQ ID NO: 676 - RNA, 13 nt, Artificial Sequence
  source: /note="Description of Artificial Sequence: Synthetic oligonucleotide"
gcaauugugaccc

SEQ ID NO: 677 - RNA, 12 nt, Artificial Sequence
  source: /note="Description of Artificial Sequence: Synthetic oligonucleotide"
aacaucauccau

SEQ ID NO: 678 - RNA, 12 nt, Artificial Sequence
  source: /note="Description of Artificial Sequence: Synthetic oligonucleotide"
ugaaauccaaca

SEQ ID NO: 679 - RNA, 15 nt, Artificial Sequence
  source: /note="Description of Artificial Sequence: Synthetic oligonucleotide"
aacaauauauuucuc

SEQ ID NO: 680 - RNA, 14 nt, Artificial Sequence
  source: /note="Description of Artificial Sequence: Synthetic oligonucleotide"
aacaguaaagucac

SEQ ID NO: 681 - RNA, 14 nt, Artificial Sequence
  source: /note="Description of Artificial Sequence: Synthetic oligonucleotide"
ugugaagaaaguaa

SEQ ID NO: 682 - RNA, 13 nt, Artificial Sequence
  source: /note="Description of Artificial Sequence: Synthetic oligonucleotide"
cuuccgagccauc

SEQ ID NO: 683 - RNA, 12 nt, Artificial Sequence
  source: /note="Description of Artificial Sequence: Synthetic oligonucleotide"
aauggagguuga

SEQ ID NO: 684 - RNA, 12 nt, Artificial Sequence
  source: /note="Description of Artificial Sequence: Synthetic oligonucleotide"
ggagguugaaua

SEQ ID NO: 685 - RNA, 13 nt, Artificial Sequence
  source: /note="Description of Artificial Sequence: Synthetic oligonucleotide"
auuuugaguuuuc

SEQ ID NO: 686 - RNA, 12 nt, Artificial Sequence
  source: /note="Description of Artificial Sequence: Synthetic oligonucleotide"
uauccuguuugu

SEQ ID NO: 687 - RNA, 11 nt, Artificial Sequence
  source: /note="Description of Artificial Sequence: Synthetic oligonucleotide"
ccuguuuguuc

SEQ ID NO: 688 - RNA, 10 nt, Artificial Sequence
  source: /note="Description of Artificial Sequence: Synthetic oligonucleotide"
cucuacagcc

SEQ ID NO: 689 - RNA, 12 nt, Artificial Sequence
  source: /note="Description of Artificial Sequence: Synthetic oligonucleotide"
ucuuccauagcu

SEQ ID NO: 690 - RNA, 12 nt, Artificial Sequence
  source: /note="Description of Artificial Sequence: Synthetic oligonucleotide"
auaaucuuccug

SEQ ID NO: 691 - RNA, 12 nt, Artificial Sequence
  source: /note="Description of Artificial Sequence: Synthetic oligonucleotide"
uaaucuuccugu

SEQ ID NO: 692 - RNA, 12 nt, Artificial Sequence
  source: /note="Description of Artificial Sequence: Synthetic oligonucleotide"
cuucaugacuug

SEQ ID NO: 693 - RNA, 12 nt, Artificial Sequence
  source: /note="Description of Artificial Sequence: Synthetic oligonucleotide"
aagagggagaga

SEQ ID NO: 694 - RNA, 12 nt, Artificial Sequence
  source: /note="Description of Artificial Sequence: Synthetic oligonucleotide"
cgucuccuacca

SEQ ID NO: 695 - RNA, 12 nt, Artificial Sequence
  source: /note="Description of Artificial Sequence: Synthetic oligonucleotide"
gaucaaucggcc

SEQ ID NO: 696 - RNA, 12 nt, Artificial Sequence
  source: /note="Description of Artificial Sequence: Synthetic oligonucleotide"
ggacgaacaucc

SEQ ID NO: 697 - RNA, 11 nt, Artificial Sequence
  source: /note="Description of Artificial Sequence: Synthetic oligonucleotide"
agggucggaac

SEQ ID NO: 698 - RNA, 10 nt, Artificial Sequence
  source: /note="Description of Artificial Sequence: Synthetic oligonucleotide"
ucggaaccca

SEQ ID NO: 699 - RNA, 11 nt, Artificial Sequence
  source: /note="Description of Artificial Sequence: Synthetic oligonucleotide"
acccaagcuua

SEQ ID NO: 700 - RNA, 14 nt, Artificial Sequence
  source: /note="Description of Artificial Sequence: Synthetic oligonucleotide"
gaacuuuaagcaac

SEQ ID NO: 701 - RNA, 11 nt, Artificial Sequence
  source: /note="Description of Artificial Sequence: Synthetic oligonucleotide"
acuauucagug

SEQ ID NO: 702 - RNA, 11 nt, Artificial Sequence
  source: /note="Description of Artificial Sequence: Synthetic oligonucleotide"
cuauucagugg

SEQ ID NO: 703 - RNA, 13 nt, Artificial Sequence
  source: /note="Description of Artificial Sequence: Synthetic oligonucleotide"
aaacacagauaac

SEQ ID NO: 704 - RNA, 12 nt, Artificial Sequence
  source: /note="Description of Artificial Sequence: Synthetic oligonucleotide"
cuuaagaaaaga

SEQ ID NO: 705 - RNA, 12 nt, Artificial Sequence
  source: /note="Description of Artificial Sequence: Synthetic oligonucleotide"
cugaaggagugu

SEQ ID NO: 706 - RNA, 10 nt, Artificial Sequence
  source: /note="Description of Artificial Sequence: Synthetic oligonucleotide"
ucaccgcggg

SEQ ID NO: 707 - RNA, 14 nt, Artificial Sequence
  source: /note="Description of Artificial Sequence: Synthetic oligonucleotide"
agcagaaauaagcg

SEQ ID NO: 708 - RNA, 12 nt, Artificial Sequence
  source: /note="Description of Artificial Sequence: Synthetic oligonucleotide"
aagcgugccguu

SEQ ID NO: 709 - RNA, 12 nt, Artificial Sequence
  source: /note="Description of Artificial Sequence: Synthetic oligonucleotide"
agaaacagucac

SEQ ID NO: 710 - RNA, 12 nt, Artificial Sequence
  source: /note="Description of Artificial Sequence: Synthetic oligonucleotide"
agaggaagaagg

SEQ ID NO: 711 - RNA, 14 nt, Artificial Sequence
  source: /note="Description of Artificial Sequence: Synthetic oligonucleotide"
uguauucaaaauau

SEQ ID NO: 712 - RNA, 13 nt, Artificial Sequence
  source: /note="Description of Artificial Sequence: Synthetic oligonucleotide"
auuuuccucccuu

SEQ ID NO: 713 - RNA, 13 nt, Artificial Sequence
  source: /note="Description of Artificial Sequence: Synthetic oligonucleotide"
caaagaaagauag

SEQ ID NO: 714 - RNA, 12 nt, Artificial Sequence
  source: /note="Description of Artificial Sequence: Synthetic oligonucleotide"
aagaaagauaga

SEQ ID NO: 715 - RNA, 13 nt, Artificial Sequence
  source: /note="Description of Artificial Sequence: Synthetic oligonucleotide"
gaaagcauuuguu

SEQ ID NO: 716 - RNA, 13 nt, Artificial Sequence
  source: /note="Description of Artificial Sequence: Synthetic oligonucleotide"
ugaguuaaacgaa

SEQ ID NO: 717 - RNA, 12 nt, Artificial Sequence
  source: /note="Description of Artificial Sequence: Synthetic oligonucleotide"
acugauacagaa

SEQ ID NO: 718 - RNA, 12 nt, Artificial Sequence
  source: /note="Description of Artificial Sequence: Synthetic oligonucleotide"
auauuauauaua

SEQ ID NO: 719 - RNA, 12 nt, Artificial Sequence
  source: /note="Description of Artificial Sequence: Synthetic oligonucleotide"
auuauauauaua

SEQ ID NO: 720 - RNA, 12 nt, Artificial Sequence
  source: /note="Description of Artificial Sequence: Synthetic oligonucleotide"
ucacuggaugua

SEQ ID NO: 721 - RNA, 12 nt, Artificial Sequence
  source: /note="Description of Artificial Sequence: Synthetic oligonucleotide"
cagggaagagga

SEQ ID NO: 722 - RNA, 15 nt, Artificial Sequence
  source: /note="Description of Artificial Sequence: Synthetic oligonucleotide"
augaucuuuuuuuug

SEQ ID NO: 723 - RNA, 11 nt, Artificial Sequence
  source: /note="Description of Artificial Sequence: Synthetic oligonucleotide"
aguucacggcc

SEQ ID NO: 724 - RNA, 13 nt, Artificial Sequence
  source: /note="Description of Artificial Sequence: Synthetic oligonucleotide"
caccaucacacca

SEQ ID NO: 725 - RNA, 11 nt, Artificial Sequence
  source: /note="Description of Artificial Sequence: Synthetic oligonucleotide"
ccugcggguuu

SEQ ID NO: 726 - RNA, 10 nt, Artificial Sequence
  source: /note="Description of Artificial Sequence: Synthetic oligonucleotide"
auccaguuug

SEQ ID NO: 727 - RNA, 13 nt, Artificial Sequence
  source: /note="Description of Artificial Sequence: Synthetic oligonucleotide"
guuaaggacuucu

SEQ ID NO: 728 - RNA, 13 nt, Artificial Sequence
  source: /note="Description of Artificial Sequence: Synthetic oligonucleotide"
cagugggacagag

SEQ ID NO: 729 - RNA, 14 nt, Artificial Sequence
  source: /note="Description of Artificial Sequence: Synthetic oligonucleotide"
aauuuguuauugug

SEQ ID NO: 730 - RNA, 13 nt, Artificial Sequence
  source: /note="Description of Artificial Sequence: Synthetic oligonucleotide"
uucaaaugcauuu

SEQ ID NO: 731 - RNA, 10 nt, Artificial Sequence
  source: /note="Description of Artificial Sequence: Synthetic oligonucleotide"
caggaaagcc

SEQ ID NO: 732 - RNA, 11 nt, Artificial Sequence
  source: /note="Description of Artificial Sequence: Synthetic oligonucleotide"
aggaaagcccu

SEQ ID NO: 733 - RNA, 12 nt, Artificial Sequence
  source: /note="Description of Artificial Sequence: Synthetic oligonucleotide"
cccagcauggcc

SEQ ID NO: 734 - RNA, 11 nt, Artificial Sequence
  source: /note="Description of Artificial Sequence: Synthetic oligonucleotide"
cuucucccuga

SEQ ID NO: 735 - RNA, 12 nt, Artificial Sequence
  source: /note="Description of Artificial Sequence: Synthetic oligonucleotide"
gaagaagcccuu

SEQ ID NO: 736 - RNA, 12 nt, Artificial Sequence
  source: /note="Description of Artificial Sequence: Synthetic oligonucleotide"
agaagcccuuca

SEQ ID NO: 737 - RNA, 11 nt, Artificial Sequence
  source: /note="Description of Artificial Sequence: Synthetic oligonucleotide"
gcccuucagcg

SEQ ID NO: 738 - RNA, 11 nt, Artificial Sequence
  source: /note="Description of Artificial Sequence: Synthetic oligonucleotide"
ccuucagcggc

SEQ ID NO: 739 - RNA, 12 nt, Artificial Sequence
  source: /note="Description of Artificial Sequence: Synthetic oligonucleotide"
ucagcggccagu

SEQ ID NO: 740 - RNA, 12 nt, Artificial Sequence
  source: /note="Description of Artificial Sequence: Synthetic oligonucleotide"
ugaaaagcuccg

SEQ ID NO: 741 - RNA, 11 nt, Artificial Sequence
  source: /note="Description of Artificial Sequence: Synthetic oligonucleotide"
aaaagcuccgg

SEQ ID NO: 742 - RNA, 13 nt, Artificial Sequence
  source: /note="Description of Artificial Sequence: Synthetic oligonucleotide"
agucaacagucug

SEQ ID NO: 743 - RNA, 13 nt, Artificial Sequence
  source: /note="Description of Artificial Sequence: Synthetic oligonucleotide"
cagaguucaaaag

SEQ ID NO: 744 - RNA, 13 nt, Artificial Sequence
  source: /note="Description of Artificial Sequence: Synthetic oligonucleotide"
agaguucaaaagc

SEQ ID NO: 745 - RNA, 12 nt, Artificial Sequence
  source: /note="Description of Artificial Sequence: Synthetic oligonucleotide"
uucaaaagcccu

SEQ ID NO: 746 - RNA, 12 nt, Artificial Sequence
  source: /note="Description of Artificial Sequence: Synthetic oligonucleotide"
ucaaaagcccuu

SEQ ID NO: 747 - RNA, 12 nt, Artificial Sequence
  source: /note="Description of Artificial Sequence: Synthetic oligonucleotide"
aaaagcccuuca

SEQ ID NO: 748 - RNA, 12 nt, Artificial Sequence
  source: /note="Description of Artificial Sequence: Synthetic oligonucleotide"
aaagcccuucag

SEQ ID NO: 749 - RNA, 13 nt, Artificial Sequence
  source: /note="Description of Artificial Sequence: Synthetic oligonucleotide"
gugaagccgcucg

SEQ ID NO: 750 - RNA, 12 nt, Artificial Sequence
  source: /note="Description of Artificial Sequence: Synthetic oligonucleotide"
cacgccagucaa

SEQ ID NO: 751 - RNA, 13 nt, Artificial Sequence
  source: /note="Description of Artificial Sequence: Synthetic oligonucleotide"
uucuuggugcgug

SEQ ID NO: 752 - RNA, 14 nt, Artificial Sequence
  source: /note="Description of Artificial Sequence: Synthetic oligonucleotide"
auuggauucaucag

SEQ ID NO: 753 - RNA, 13 nt, Artificial Sequence
  source: /note="Description of Artificial Sequence: Synthetic oligonucleotide"
uggaauaccuaag

SEQ ID NO: 754 - RNA, 12 nt, Artificial Sequence
  source: /note="Description of Artificial Sequence: Synthetic oligonucleotide"
auuugaggcuca

SEQ ID NO: 755 - RNA, 11 nt, Artificial Sequence
  source: /note="Description of Artificial Sequence: Synthetic oligonucleotide"
ucuacaauugg

SEQ ID NO: 756 - RNA, 12 nt, Artificial Sequence
  source: /note="Description of Artificial Sequence: Synthetic oligonucleotide"
uaguuaggagcc

SEQ ID NO: 757 - RNA, 13 nt, Artificial Sequence
  source: /note="Description of Artificial Sequence: Synthetic oligonucleotide"
agucaauauccac

SEQ ID NO: 758 - RNA, 13 nt, Artificial Sequence
  source: /note="Description of Artificial Sequence: Synthetic oligonucleotide"
auguucagucaca

SEQ ID NO: 759 - RNA, 12 nt, Artificial Sequence
  source: /note="Description of Artificial Sequence: Synthetic oligonucleotide"
acacacacauac

SEQ ID NO: 760 - RNA, 12 nt, Artificial Sequence
  source: /note="Description of Artificial Sequence: Synthetic oligonucleotide"
uuccuuuugcuu

SEQ ID NO: 761 - RNA, 16 nt, Artificial Sequence
  source: /note="Description of Artificial Sequence: Synthetic oligonucleotide"
uuuuaaaguaauuuuu

SEQ ID NO: 762 - RNA, 13 nt, Artificial Sequence
  source: /note="Description of Artificial Sequence: Synthetic oligonucleotide"
caacagucaaugg

SEQ ID NO: 763 - RNA, 13 nt, Artificial Sequence
  source: /note="Description of Artificial Sequence: Synthetic oligonucleotide"
ucgacaaaccaau

SEQ ID NO: 764 - RNA, 12 nt, Artificial Sequence
  source: /note="Description of Artificial Sequence: Synthetic oligonucleotide"
acugcuaccacu

SEQ ID NO: 765 - RNA, 13 nt, Artificial Sequence
  source: /note="Description of Artificial Sequence: Synthetic oligonucleotide"
gcaagcggucuua

SEQ ID NO: 766 - RNA, 13 nt, Artificial Sequence
  source: /note="Description of Artificial Sequence: Synthetic oligonucleotide"
ggucuuaccggcu

SEQ ID NO: 767 - RNA, 11 nt, Artificial Sequence
  source: /note="Description of Artificial Sequence: Synthetic oligonucleotide"
gauggguuacc

SEQ ID NO: 768 - RNA, 11 nt, Artificial Sequence
  source: /note="Description of Artificial Sequence: Synthetic oligonucleotide"
guuaccugcga

SEQ ID NO: 769 - RNA, 12 nt, Artificial Sequence
  source: /note="Description of Artificial Sequence: Synthetic oligonucleotide"
aaucuugcugag

SEQ ID NO: 770 - RNA, 13 nt, Artificial Sequence
  source: /note="Description of Artificial Sequence: Synthetic oligonucleotide"
agcauaaaacagu

SEQ ID NO: 771 - RNA, 12 nt, Artificial Sequence
  source: /note="Description of Artificial Sequence: Synthetic oligonucleotide"
guccuuuauccu

SEQ ID NO: 772 - RNA, 12 nt, Artificial Sequence
  source: /note="Description of Artificial Sequence: Synthetic oligonucleotide"
caacgcaaguug

SEQ ID NO: 773 - RNA, 13 nt, Artificial Sequence
  source: /note="Description of Artificial Sequence: Synthetic oligonucleotide"
aaacugaaaccau

SEQ ID NO: 774 - RNA, 14 nt, Artificial Sequence
  source: /note="Description of Artificial Sequence: Synthetic oligonucleotide"
acuuuguuaaauau

SEQ ID NO: 775 - RNA, 14 nt, Artificial Sequence
  source: /note="Description of Artificial Sequence: Synthetic oligonucleotide"
guauauuaaaaguu

SEQ ID NO: 776 - RNA, 13 nt, Artificial Sequence
  source: /note="Description of Artificial Sequence: Synthetic oligonucleotide"
guuuugacuuaac

SEQ ID NO: 777 - RNA, 13 nt, Artificial Sequence
  source: /note="Description of Artificial Sequence: Synthetic oligonucleotide"
gcaaacucagcac

SEQ ID NO: 778 - RNA, 11 nt, Artificial Sequence
  source: /note="Description of Artificial Sequence: Synthetic oligonucleotide"
ugcugaccuca

SEQ ID NO: 779 - RNA, 14 nt, Artificial Sequence
  source: /note="Description of Artificial Sequence: Synthetic oligonucleotide"
uuuauucagaucgc

SEQ ID NO: 780 - RNA, 13 nt, Artificial Sequence
  source: /note="Description of Artificial Sequence: Synthetic oligonucleotide"
aggguucugggau

SEQ ID NO: 781 - RNA, 15 nt, Artificial Sequence
  source: /note="Description of Artificial Sequence: Synthetic oligonucleotide"
auauuggaaauuaug

SEQ ID NO: 782 - RNA, 13 nt, Artificial Sequence
  source: /note="Description of Artificial Sequence: Synthetic oligonucleotide"
auggaagcacuag

SEQ ID NO: 783 - RNA, 13 nt, Artificial Sequence
  source: /note="Description of Artificial Sequence: Synthetic oligonucleotide"
guuuuuaugugga

SEQ ID NO: 784 - RNA, 12 nt, Artificial Sequence
  source: /note="Description of Artificial Sequence: Synthetic oligonucleotide"
ggaauugguaga

SEQ ID NO: 785 - RNA, 13 nt, Artificial Sequence
  source: /note="Description of Artificial Sequence: Synthetic oligonucleotide"
uuagacuuggaga

SEQ ID NO: 786 - RNA, 13 nt, Artificial Sequence
  source: /note="Description of Artificial Sequence: Synthetic oligonucleotide"
uuacaguauucca

SEQ ID NO: 787 - RNA, 15 nt, Artificial Sequence
  source: /note="Description of Artificial Sequence: Synthetic oligonucleotide"
ccacugaugaauuaa

SEQ ID NO: 788 - RNA, 12 nt, Artificial Sequence
  source: /note="Description of Artificial Sequence: Synthetic oligonucleotide"
ccacaucaucac

SEQ ID NO: 789 - RNA, 13 nt, Artificial Sequence
  source: /note="Description of Artificial Sequence: Synthetic oligonucleotide"
cucaccaaacaga

SEQ ID NO: 790 - RNA, 12 nt, Artificial Sequence
  source: /note="Description of Artificial Sequence: Synthetic oligonucleotide"
ggaacaugaugg

SEQ ID NO: 791 - RNA, 12 nt, Artificial Sequence
  source: /note="Description of Artificial Sequence: Synthetic oligonucleotide"
cauguagacugc

SEQ ID NO: 792 - RNA, 13 nt, Artificial Sequence
  source: /note="Description of Artificial Sequence: Synthetic oligonucleotide"
ggaucuauuuaug

SEQ ID NO: 793 - RNA, 12 nt, Artificial Sequence
  source: /note="Description of Artificial Sequence: Synthetic oligonucleotide"
gcacuauuauca

SEQ ID NO: 794 - RNA, 11 nt, Artificial Sequence
  source: /note="Description of Artificial Sequence: Synthetic oligonucleotide"
aucaguucugc

SEQ ID NO: 795 - RNA, 13 nt, Artificial Sequence
  source: /note="Description of Artificial Sequence: Synthetic oligonucleotide"
agauuaaaccuac

SEQ ID NO: 796 - RNA, 13 nt, Artificial Sequence
  source: /note="Description of Artificial Sequence: Synthetic oligonucleotide"
auaaaauccuucu

SEQ ID NO: 797 - RNA, 12 nt, Artificial Sequence
  source: /note="Description of Artificial Sequence: Synthetic oligonucleotide"
aaugcuguagac

SEQ ID NO: 798 - RNA, 13 nt, Artificial Sequence
  source: /note="Description of Artificial Sequence: Synthetic oligonucleotide"
uugauaggaauag

SEQ ID NO: 799 - RNA, 11 nt, Artificial Sequence
  source: /note="Description of Artificial Sequence: Synthetic oligonucleotide"
aauggcccuga

SEQ ID NO: 800 - RNA, 11 nt, Artificial Sequence
  source: /note="Description of Artificial Sequence: Synthetic oligonucleotide"
uuccucaagca

SEQ ID NO: 801 - RNA, 10 nt, Artificial Sequence
  source: /note="Description of Artificial Sequence: Synthetic oligonucleotide"
guucagccca

SEQ ID NO: 802 - RNA, 11 nt, Artificial Sequence
  source: /note="Description of Artificial Sequence: Synthetic oligonucleotide"
gcugcugaacc

SEQ ID NO: 803 - RNA, 12 nt, Artificial Sequence
  source: /note="Description of Artificial Sequence: Synthetic oligonucleotide"
aaguucucuuca

SEQ ID NO: 804 - RNA, 11 nt, Artificial Sequence
  source: /note="Description of Artificial Sequence: Synthetic oligonucleotide"
ccagccuagag

SEQ ID NO: 805 - RNA, 13 nt, Artificial Sequence
  source: /note="Description of Artificial Sequence: Synthetic oligonucleotide"
cucugugaagugu

SEQ ID NO: 806 - RNA, 14 nt, Artificial Sequence
  source: /note="Description of Artificial Sequence: Synthetic oligonucleotide"
ugagaaaauuucaa

SEQ ID NO: 807 - RNA, 11 nt, Artificial Sequence
  source: /note="Description of Artificial Sequence: Synthetic oligonucleotide"
aauccuccuga

SEQ ID NO: 808 - RNA, 12 nt, Artificial Sequence
  source: /note="Description of Artificial Sequence: Synthetic oligonucleotide"
gugacaucauau

SEQ ID NO: 809 - RNA, 13 nt, Artificial Sequence
  source: /note="Description of Artificial Sequence: Synthetic oligonucleotide"
aaucuucaucaua

SEQ ID NO: 810 - RNA, 13 nt, Artificial Sequence
  source: /note="Description of Artificial Sequence: Synthetic oligonucleotide"
gacuagcuauuaa

SEQ ID NO: 811 - RNA, 14 nt, Artificial Sequence
  source: /note="Description of Artificial Sequence: Synthetic oligonucleotide"
ucucuacuaaaaau

SEQ ID NO: 812 - RNA, 12 nt, Artificial Sequence
  source: /note="Description of Artificial Sequence: Synthetic oligonucleotide"
ucuaucucgccu

SEQ ID NO: 813 - RNA, 13 nt, Artificial Sequence
  source: /note="Description of Artificial Sequence: Synthetic oligonucleotide"
cuucgguccaguu

SEQ ID NO: 814 - RNA, 11 nt, Artificial Sequence
  source: /note="Description of Artificial Sequence: Synthetic oligonucleotide"
gauguagccgc

SEQ ID NO: 815 - RNA, 12 nt, Artificial Sequence
  source: /note="Description of Artificial Sequence: Synthetic oligonucleotide"
ugaggagacuug

SEQ ID NO: 816 - RNA, 12 nt, Artificial Sequence
  source: /note="Description of Artificial Sequence: Synthetic oligonucleotide"
gaguagugagga

SEQ ID NO: 817 - RNA, 14 nt, Artificial Sequence
  source: /note="Description of Artificial Sequence: Synthetic oligonucleotide"
cagaugaguacaaa

SEQ ID NO: 818 - RNA, 13 nt, Artificial Sequence
  source: /note="Description of Artificial Sequence: Synthetic oligonucleotide"
guuguuaaugggc

SEQ ID NO: 819 - RNA, 13 nt, Artificial Sequence
  source: /note="Description of Artificial Sequence: Synthetic oligonucleotide"
uuuuuaauuuauu

SEQ ID NO: 820 - RNA, 12 nt, Artificial Sequence
  source: /note="Description of Artificial Sequence: Synthetic oligonucleotide"
uauuuaaauaug

SEQ ID NO: 821 - RNA, 13 nt, Artificial Sequence
  source: /note="Description of Artificial Sequence: Synthetic oligonucleotide"
uauccuuuguuuc

SEQ ID NO: 822 - RNA, 14 nt, Artificial Sequence
  source: /note="Description of Artificial Sequence: Synthetic oligonucleotide"
cgucuaaguguuug

SEQ ID NO: 823 - RNA, 12 nt, Artificial Sequence
  source: /note="Description of Artificial Sequence: Synthetic oligonucleotide"
accugugacaaa

SEQ ID NO: 824 - RNA, 13 nt, Artificial Sequence
  source: /note="Description of Artificial Sequence: Synthetic oligonucleotide"
ccaggcugaauua

SEQ ID NO: 825 - RNA, 14 nt, Artificial Sequence
  source: /note="Description of Artificial Sequence: Synthetic oligonucleotide"
gucauucuuacaau

SEQ ID NO: 826 - RNA, 15 nt, Artificial Sequence
  source: /note="Description of Artificial Sequence: Synthetic oligonucleotide"
ucauucuuacaauug

SEQ ID NO: 827 - RNA, 12 nt, Artificial Sequence
  source: /note="Description of Artificial Sequence: Synthetic oligonucleotide"
cagagaguguac

SEQ ID NO: 828 - RNA, 12 nt, Artificial Sequence
  source: /note="Description of Artificial Sequence: Synthetic oligonucleotide"
agaacucagcag

SEQ ID NO: 829 - RNA, 13 nt, Artificial Sequence
  source: /note="Description of Artificial Sequence: Synthetic oligonucleotide"
uuuauuuucagua

SEQ ID NO: 830 - RNA, 12 nt, Artificial Sequence
  source: /note="Description of Artificial Sequence: Synthetic oligonucleotide"
ucuuaaauggaa

SEQ ID NO: 831 - RNA, 13 nt, Artificial Sequence
  source: /note="Description of Artificial Sequence: Synthetic oligonucleotide"
ugccuaaaauugu

SEQ ID NO: 832 - RNA, 12 nt, Artificial Sequence
  source: /note="Description of Artificial Sequence: Synthetic oligonucleotide"
agacugugagcu

SEQ ID NO: 833 - RNA, 14 nt, Artificial Sequence
  source: /note="Description of Artificial Sequence: Synthetic oligonucleotide"
ugcuuuuuauuaau

SEQ ID NO: 834 - RNA, 13 nt, Artificial Sequence
  source: /note="Description of Artificial Sequence: Synthetic oligonucleotide"
cucuucuuacauu

SEQ ID NO: 835 - RNA, 15 nt, Artificial Sequence
  source: /note="Description of Artificial Sequence: Synthetic oligonucleotide"
cauuuguaaaaaugu

SEQ ID NO: 836 - RNA, 15 nt, Artificial Sequence
  source: /note="Description of Artificial Sequence: Synthetic oligonucleotide"
aucuuaauucauauu

SEQ ID NO: 837 - RNA, 13 nt, Artificial Sequence
  source: /note="Description of Artificial Sequence: Synthetic oligonucleotide"
gaacuaaucauga

SEQ ID NO: 838 - RNA, 12 nt, Artificial Sequence
  source: /note="Description of Artificial Sequence: Synthetic oligonucleotide"
ucugcucuuggg

SEQ ID NO: 839 - RNA, 13 nt, Artificial Sequence
  source: /note="Description of Artificial Sequence: Synthetic oligonucleotide"
caguagcuuugag

SEQ ID NO: 840 - RNA, 14 nt, Artificial Sequence
  source: /note="Description of Artificial Sequence: Synthetic oligonucleotide"
cacguaauauuuca

SEQ ID NO: 841 - RNA, 13 nt, Artificial Sequence
  source: /note="Description of Artificial Sequence: Synthetic oligonucleotide"
uauucucuucacu

SEQ ID NO: 842 - RNA, 14 nt, Artificial Sequence
  source: /note="Description of Artificial Sequence: Synthetic oligonucleotide"
cuaaugcuaagaaa

SEQ ID NO: 843 - RNA, 12 nt, Artificial Sequence
  source: /note="Description of Artificial Sequence: Synthetic oligonucleotide"
gcugaaaaucaa

SEQ ID NO: 844 - RNA, 14 nt, Artificial Sequence
  source: /note="Description of Artificial Sequence: Synthetic oligonucleotide"
aauaugauuacuuu

SEQ ID NO: 845 - RNA, 14 nt, Artificial Sequence
  source: /note="Description of Artificial Sequence: Synthetic oligonucleotide"
cauuuuguucuaca

SEQ ID NO: 846 - RNA, 12 nt, Artificial Sequence
  source: /note="Description of Artificial Sequence: Synthetic oligonucleotide"
cccgggacucuc

SEQ ID NO: 847 - RNA, 14 nt, Artificial Sequence
  source: /note="Description of Artificial Sequence: Synthetic oligonucleotide"
ccuuuaaaguaaag

SEQ ID NO: 848 - RNA, 13 nt, Artificial Sequence
  source: /note="Description of Artificial Sequence: Synthetic oligonucleotide"
ucuggaagccugg

SEQ ID NO: 849 - RNA, 14 nt, Artificial Sequence
  source: /note="Description of Artificial Sequence: Synthetic oligonucleotide"
aaaacaaaagagag

SEQ ID NO: 850 - RNA, 13 nt, Artificial Sequence
  source: /note="Description of Artificial Sequence: Synthetic oligonucleotide"
aucaguuaugccg

SEQ ID NO: 851 - RNA, 13 nt, Artificial Sequence
  source: /note="Description of Artificial Sequence: Synthetic oligonucleotide"
uaaaagaagucca

SEQ ID NO: 852 - RNA, 11 nt, Artificial Sequence
  source: /note="Description of Artificial Sequence: Synthetic oligonucleotide"
aggugagguua

SEQ ID NO: 853 - RNA, 11 nt, Artificial Sequence
  source: /note="Description of Artificial Sequence: Synthetic oligonucleotide"
gggaagaggac

SEQ ID NO: 854 - RNA, 13 nt, Artificial Sequence
  source: /note="Description of Artificial Sequence: Synthetic oligonucleotide"
aagcaaguauugu

SEQ ID NO: 855 - RNA, 12 nt, Artificial Sequence
  source: /note="Description of Artificial Sequence: Synthetic oligonucleotide"
auuguagcacuc

SEQ ID NO: 856 - RNA, 14 nt, Artificial Sequence
  source: /note="Description of Artificial Sequence: Synthetic oligonucleotide"
acaaaaccacaaau

SEQ ID NO: 857 - RNA, 12 nt, Artificial Sequence
  source: /note="Description of Artificial Sequence: Synthetic oligonucleotide"
uaagcccauaca

SEQ ID NO: 858 - RNA, 11 nt, Artificial Sequence
  source: /note="Description of Artificial Sequence: Synthetic oligonucleotide"
agcccauacag

SEQ ID NO: 859 - RNA, 12 nt, Artificial Sequence
  source: /note="Description of Artificial Sequence: Synthetic oligonucleotide"
cagaaaccuucc

SEQ ID NO: 860 - RNA, 10 nt, Artificial Sequence
  source: /note="Description of Artificial Sequence: Synthetic oligonucleotide"
guauaccuac

SEQ ID NO: 861 - RNA, 13 nt, Artificial Sequence
  source: /note="Description of Artificial Sequence: Synthetic oligonucleotide"
gccaguuuucgga

SEQ ID NO: 862 - RNA, 9 nt, Artificial Sequence
  source: /note="Description of Artificial Sequence: Synthetic oligonucleotide"
ggaacaggg

SEQ ID NO: 863 - RNA, 13 nt, Artificial Sequence
  source: /note="Description of Artificial Sequence: Synthetic oligonucleotide"
uuaacuuuccagu

SEQ ID NO: 864 - RNA, 14 nt, Artificial Sequence
  source: /note="Description of Artificial Sequence: Synthetic oligonucleotide"
aaaguuugguuuug

SEQ ID NO: 865 - RNA, 12 nt, Artificial Sequence
  source: /note="Description of Artificial Sequence: Synthetic oligonucleotide"
cuucccacugua

SEQ ID NO: 866 - RNA, 13 nt, Artificial Sequence
  source: /note="Description of Artificial Sequence: Synthetic oligonucleotide"
ugauaccauauga

SEQ ID NO: 867 - RNA, 11 nt, Artificial Sequence
  source: /note="Description of Artificial Sequence: Synthetic oligonucleotide"
aacaugggcug

SEQ ID NO: 868 - RNA, 13 nt, Artificial Sequence
  source: /note="Description of Artificial Sequence: Synthetic oligonucleotide"
caacuuuuucaua

SEQ ID NO: 869 - RNA, 12 nt, Artificial Sequence
  source: /note="Description of Artificial Sequence: Synthetic oligonucleotide"
caugaggccgga

SEQ ID NO: 870 - RNA, 11 nt, Artificial Sequence
  source: /note="Description of Artificial Sequence: Synthetic oligonucleotide"
acugcauuugu

SEQ ID NO: 871 - RNA, 13 nt, Artificial Sequence
  source: /note="Description of Artificial Sequence: Synthetic oligonucleotide"
aauguuuacuacc

SEQ ID NO: 872 - RNA, 15 nt, Artificial Sequence
  source: /note="Description of Artificial Sequence: Synthetic oligonucleotide"
aauuuuuugaugaaa

SEQ ID NO: 873 - RNA, 14 nt, Artificial Sequence
  source: /note="Description of Artificial Sequence: Synthetic oligonucleotide"
cagugugugaauuu

SEQ ID NO: 874 - RNA, 13 nt, Artificial Sequence
  source: /note="Description of Artificial Sequence: Synthetic oligonucleotide"
gagcaauguaugu

SEQ ID NO: 875 - RNA, 14 nt, Artificial Sequence
  source: /note="Description of Artificial Sequence: Synthetic oligonucleotide"
aaagcacauauaua

SEQ ID NO: 876 - RNA, 14 nt, Artificial Sequence
  source: /note="Description of Artificial Sequence: Synthetic oligonucleotide"
guaauaguuucucc

SEQ ID NO: 877 - RNA, 13 nt, Artificial Sequence
  source: /note="Description of Artificial Sequence: Synthetic oligonucleotide"
aguuucuccaaau

SEQ ID NO: 878 - RNA, 13 nt, Artificial Sequence
  source: /note="Description of Artificial Sequence: Synthetic oligonucleotide"
uacuuccuagaaa

SEQ ID NO: 879 - RNA, 13 nt, Artificial Sequence
  source: /note="Description of Artificial Sequence: Synthetic oligonucleotide"
uacaccauauaug

SEQ ID NO: 880 - RNA, 14 nt, Artificial Sequence
  source: /note="Description of Artificial Sequence: Synthetic oligonucleotide"
auauaugaauggag

SEQ ID NO: 881 - RNA, 13 nt, Artificial Sequence
  source: /note="Description of Artificial Sequence: Synthetic oligonucleotide"
acgagaagaagau

SEQ ID NO: 882 - RNA, 13 nt, Artificial Sequence
  source: /note="Description of Artificial Sequence: Synthetic oligonucleotide"
ucauuuacaggga

SEQ ID NO: 883 - RNA, 13 nt, Artificial Sequence
  source: /note="Description of Artificial Sequence: Synthetic oligonucleotide"
cauuuacagggac

SEQ ID NO: 884 - RNA, 10 nt, Artificial Sequence
  source: /note="Description of Artificial Sequence: Synthetic oligonucleotide"
agggaccuga

SEQ ID NO: 885 - RNA, 14 nt, Artificial Sequence
  source: /note="Description of Artificial Sequence: Synthetic oligonucleotide"
uguuugacugcauc

SEQ ID NO: 886 - RNA, 13 nt, Artificial Sequence
  source: /note="Description of Artificial Sequence: Synthetic oligonucleotide"
uuugacugcaucg

SEQ ID NO: 887 - RNA, 12 nt, Artificial Sequence
  source: /note="Description of Artificial Sequence: Synthetic oligonucleotide"
gaguucacaggg

SEQ ID NO: 888 - RNA, 13 nt, Artificial Sequence
  source: /note="Description of Artificial Sequence: Synthetic oligonucleotide"
ggcaccucugucc

SEQ ID NO: 889 - RNA, 15 nt, Artificial Sequence
  source: /note="Description of Artificial Sequence: Synthetic oligonucleotide"
gguuugucuuuuuaa

SEQ ID NO: 890 - RNA, 14 nt, Artificial Sequence
  source: /note="Description of Artificial Sequence: Synthetic oligonucleotide"
uuugucuuuuuaag

SEQ ID NO: 891 - RNA, 13 nt, Artificial Sequence
  source: /note="Description of Artificial Sequence: Synthetic oligonucleotide"
ccuaaagguuguc

SEQ ID NO: 892 - RNA, 12 nt, Artificial Sequence
  source: /note="Description of Artificial Sequence: Synthetic oligonucleotide"
aagguugucgac

SEQ ID NO: 893 - RNA, 13 nt, Artificial Sequence
  source: /note="Description of Artificial Sequence: Synthetic oligonucleotide"
accuggcaauugu

SEQ ID NO: 894 - RNA, 12 nt, Artificial Sequence
  source: /note="Description of Artificial Sequence: Synthetic oligonucleotide"
aguggugcgagg

SEQ ID NO: 895 - RNA, 13 nt, Artificial Sequence
  source: /note="Description of Artificial Sequence: Synthetic oligonucleotide"
agagacaugaaau

SEQ ID NO: 896 - RNA, 13 nt, Artificial Sequence
  source: /note="Description of Artificial Sequence: Synthetic oligonucleotide"
auauauuucucca

SEQ ID NO: 897 - RNA, 10 nt, Artificial Sequence
  source: /note="Description of Artificial Sequence: Synthetic oligonucleotide"
caugaaggcu

SEQ ID NO: 898 - RNA, 11 nt, Artificial Sequence
  source: /note="Description of Artificial Sequence: Synthetic oligonucleotide"
gcuggaguggu

SEQ ID NO: 899 - RNA, 11 nt, Artificial Sequence
  source: /note="Description of Artificial Sequence: Synthetic oligonucleotide"
aggaagagagg

SEQ ID NO: 900 - RNA, 12 nt, Artificial Sequence
  source: /note="Description of Artificial Sequence: Synthetic oligonucleotide"
cuugcaucgggc

SEQ ID NO: 901 - RNA, 13 nt, Artificial Sequence
  source: /note="Description of Artificial Sequence: Synthetic oligonucleotide"
auauccuacugug

SEQ ID NO: 902 - RNA, 13 nt, Artificial Sequence
  source: /note="Description of Artificial Sequence: Synthetic oligonucleotide"
uccuacuguguaa

SEQ ID NO: 903 - RNA, 12 nt, Artificial Sequence
  source: /note="Description of Artificial Sequence: Synthetic oligonucleotide"
ccuuguagugua

SEQ ID NO: 904 - RNA, 13 nt, Artificial Sequence
  source: /note="Description of Artificial Sequence: Synthetic oligonucleotide"
ucuuuguugauug

SEQ ID NO: 905 - RNA, 14 nt, Artificial Sequence
  source: /note="Description of Artificial Sequence: Synthetic oligonucleotide"
uuuguugauugaaa

SEQ ID NO: 906 - RNA, 15 nt, Artificial Sequence
  source: /note="Description of Artificial Sequence: Synthetic oligonucleotide"
uucuuuuucuuccau

SEQ ID NO: 907 - RNA, 13 nt, Artificial Sequence
  source: /note="Description of Artificial Sequence: Synthetic oligonucleotide"
aaucuuccuucua

SEQ ID NO: 908 - RNA, 13 nt, Artificial Sequence
  source: /note="Description of Artificial Sequence: Synthetic oligonucleotide"
uugaaugcuucau

SEQ ID NO: 909 - RNA, 13 nt, Artificial Sequence
  source: /note="Description of Artificial Sequence: Synthetic oligonucleotide"
ugaaugcuucaug

SEQ ID NO: 910 - RNA, 13 nt, Artificial Sequence
  source: /note="Description of Artificial Sequence: Synthetic oligonucleotide"
aauucuacuuuga

SEQ ID NO: 911 - RNA, 13 nt, Artificial Sequence
  source: /note="Description of Artificial Sequence: Synthetic oligonucleotide"
agcaacuacagac

SEQ ID NO: 912 - RNA, 13 nt, Artificial Sequence
  source: /note="Description of Artificial Sequence: Synthetic oligonucleotide"
gaccaaggucaac

SEQ ID NO: 913 - RNA, 13 nt, Artificial Sequence
  source: /note="Description of Artificial Sequence: Synthetic oligonucleotide"
cgacuaucucgac

SEQ ID NO: 914 - RNA, 13 nt, Artificial Sequence
  source: /note="Description of Artificial Sequence: Synthetic oligonucleotide"
aaccuucccaaac

SEQ ID NO: 915 - RNA, 14 nt, Artificial Sequence
  source: /note="Description of Artificial Sequence: Synthetic oligonucleotide"
ccaagcuuagaacu

SEQ ID NO: 916 - RNA, 15 nt, Artificial Sequence
  source: /note="Description of Artificial Sequence: Synthetic oligonucleotide"
agcuuagaacuuuaa

SEQ ID NO: 917 - RNA, 11 nt, Artificial Sequence
  source: /note="Description of Artificial Sequence: Synthetic oligonucleotide"
aagaccaccac

SEQ ID NO: 918 - RNA, 14 nt, Artificial Sequence
  source: /note="Description of Artificial Sequence: Synthetic oligonucleotide"
gcgagaaauaaagu

SEQ ID NO: 919 - RNA, 14 nt, Artificial Sequence
  source: /note="Description of Artificial Sequence: Synthetic oligonucleotide"
cgagaaauaaaguu

SEQ ID NO: 920 - RNA, 12 nt, Artificial Sequence
  source: /note="Description of Artificial Sequence: Synthetic oligonucleotide"
aggaaaugaucc

SEQ ID NO: 921 - RNA, 13 nt, Artificial Sequence
  source: /note="Description of Artificial Sequence: Synthetic oligonucleotide"
gaagaaaugaaac

SEQ ID NO: 922 - RNA, 13 nt, Artificial Sequence
  source: /note="Description of Artificial Sequence: Synthetic oligonucleotide"
guuuccauccucc

SEQ ID NO: 923 - RNA, 15 nt, Artificial Sequence
  source: /note="Description of Artificial Sequence: Synthetic oligonucleotide"
acugaaaaucuuuga

SEQ ID NO: 924 - RNA, 11 nt, Artificial Sequence
  source: /note="Description of Artificial Sequence: Synthetic oligonucleotide"
ugccguucagg

SEQ ID NO: 925 - RNA, 13 nt, Artificial Sequence
  source: /note="Description of Artificial Sequence: Synthetic oligonucleotide"
caggguccagaag

SEQ ID NO: 926 - RNA, 13 nt, Artificial Sequence
  source: /note="Description of Artificial Sequence: Synthetic oligonucleotide"
ucaagacugcuug

SEQ ID NO: 927 - RNA, 13 nt, Artificial Sequence
  source: /note="Description of Artificial Sequence: Synthetic oligonucleotide"
uccaugucuuugg

SEQ ID NO: 928 - RNA, 11 nt, Artificial Sequence
  source: /note="Description of Artificial Sequence: Synthetic oligonucleotide"
gccugaaacac

SEQ ID NO: 929 - RNA, 12 nt, Artificial Sequence
  source: /note="Description of Artificial Sequence: Synthetic oligonucleotide"
ucucuguaccuc

SEQ ID NO: 930 - RNA, 12 nt, Artificial Sequence
  source: /note="Description of Artificial Sequence: Synthetic oligonucleotide"
agcaagacaaga

SEQ ID NO: 931 - RNA, 13 nt, Artificial Sequence
  source: /note="Description of Artificial Sequence: Synthetic oligonucleotide"
gcaagacaagaaa

SEQ ID NO: 932 - RNA, 12 nt, Artificial Sequence
  source: /note="Description of Artificial Sequence: Synthetic oligonucleotide"
uguacaagaucc

SEQ ID NO: 933 - RNA, 12 nt, Artificial Sequence
  source: /note="Description of Artificial Sequence: Synthetic oligonucleotide"
cguacuugcaga

SEQ ID NO: 934 - RNA, 13 nt, Artificial Sequence
  source: /note="Description of Artificial Sequence: Synthetic oligonucleotide"
cgaucgauacaga

SEQ ID NO: 935 - RNA, 13 nt, Artificial Sequence
  source: /note="Description of Artificial Sequence: Synthetic oligonucleotide"
uauaaaaauaaau

SEQ ID NO: 936 - RNA, 13 nt, Artificial Sequence
  source: /note="Description of Artificial Sequence: Synthetic oligonucleotide"
uaaaaauaaauau

SEQ ID NO: 937 - RNA, 13 nt, Artificial Sequence
  source: /note="Description of Artificial Sequence: Synthetic oligonucleotide"
uuugacugcugug

SEQ ID NO: 938 - RNA, 13 nt, Artificial Sequence
  source: /note="Description of Artificial Sequence: Synthetic oligonucleotide"
ggagaugagagac

SEQ ID NO: 939 - RNA, 10 nt, Artificial Sequence
  source: /note="Description of Artificial Sequence: Synthetic oligonucleotide"
ucccacuugg

SEQ ID NO: 940 - RNA, 10 nt, Artificial Sequence
  source: /note="Description of Artificial Sequence: Synthetic oligonucleotide"
guucacggcc

SEQ ID NO: 941 - RNA, 12 nt, Artificial Sequence
  source: /note="Description of Artificial Sequence: Synthetic oligonucleotide"
accaucacacca

SEQ ID NO: 942 - RNA, 10 nt, Artificial Sequence
  source: /note="Description of Artificial Sequence: Synthetic oligonucleotide"
cugcggguuu

SEQ ID NO: 943 - RNA, 9 nt, Artificial Sequence
  source: /note="Description of Artificial Sequence: Synthetic oligonucleotide"
uccaguuug

SEQ ID NO: 944 - RNA, 12 nt, Artificial Sequence
  source: /note="Description of Artificial Sequence: Synthetic oligonucleotide"
uuaaggacuucu

SEQ ID NO: 945 - RNA, 12 nt, Artificial Sequence
  source: /note="Description of Artificial Sequence: Synthetic oligonucleotide"
agugggacagag

SEQ ID NO: 946 - RNA, 13 nt, Artificial Sequence
  source: /note="Description of Artificial Sequence: Synthetic oligonucleotide"
auuuguuauugug

SEQ ID NO: 947 - RNA, 12 nt, Artificial Sequence
  source: /note="Description of Artificial Sequence: Synthetic oligonucleotide"
ucaaaugcauuu

SEQ ID NO: 948 - RNA, 9 nt, Artificial Sequence
  source: /note="Description of Artificial Sequence: Synthetic oligonucleotide"
aggaaagcc

SEQ ID NO: 949 - RNA, 10 nt, Artificial Sequence
  source: /note="Description of Artificial Sequence: Synthetic oligonucleotide"
ggaaagcccu

SEQ ID NO: 950 - RNA, 11 nt, Artificial Sequence
  source: /note="Description of Artificial Sequence: Synthetic oligonucleotide"
ccagcauggcc

SEQ ID NO: 951 - RNA, 10 nt, Artificial Sequence
  source: /note="Description of Artificial Sequence: Synthetic oligonucleotide"
uucucccuga

SEQ ID NO: 952 - RNA, 11 nt, Artificial Sequence
  source: /note="Description of Artificial Sequence: Synthetic oligonucleotide"
aagaagcccuu

SEQ ID NO: 953 - RNA, 11 nt, Artificial Sequence
  source: /note="Description of Artificial Sequence: Synthetic oligonucleotide"
gaagcccuuca

SEQ ID NO: 954 - RNA, 10 nt, Artificial Sequence
  source: /note="Description of Artificial Sequence: Synthetic oligonucleotide"
cccuucagcg

SEQ ID NO: 955 - RNA, 10 nt, Artificial Sequence
  source: /note="Description of Artificial Sequence: Synthetic oligonucleotide"
cuucagcggc

SEQ ID NO: 956 - RNA, 11 nt, Artificial Sequence
  source: /note="Description of Artificial Sequence: Synthetic oligonucleotide"
cagcggccagu

SEQ ID NO: 957 - RNA, 11 nt, Artificial Sequence
  source: /note="Description of Artificial Sequence: Synthetic oligonucleotide"
gaaaagcuccg

SEQ ID NO: 958 - RNA, 10 nt, Artificial Sequence
  source: /note="Description of Artificial Sequence: Synthetic oligonucleotide"
aaagcuccgg

SEQ ID NO: 959 - RNA, 12 nt, Artificial Sequence
  source: /note="Description of Artificial Sequence: Synthetic oligonucleotide"
gucaacagucug

SEQ ID NO: 960 - RNA, 12 nt, Artificial Sequence
  source: /note="Description of Artificial Sequence: Synthetic oligonucleotide"
agaguucaaaag

SEQ ID NO: 961 - RNA, 12 nt, Artificial Sequence
  source: /note="Description of Artificial Sequence: Synthetic oligonucleotide"
gaguucaaaagc

SEQ ID NO: 962 - RNA, 11 nt, Artificial Sequence
  source: /note="Description of Artificial Sequence: Synthetic oligonucleotide"
ucaaaagcccu

SEQ ID NO: 963 - RNA, 11 nt, Artificial Sequence
  source: /note="Description of Artificial Sequence: Synthetic oligonucleotide"
caaaagcccuu

SEQ ID NO: 964 - RNA, 11 nt, Artificial Sequence
  source: /note="Description of Artificial Sequence: Synthetic oligonucleotide"
aaagcccuuca

SEQ ID NO: 965 - RNA, 11 nt, Artificial Sequence
  source: /note="Description of Artificial Sequence: Synthetic oligonucleotide"
aagcccuucag

SEQ ID NO: 966 - RNA, 12 nt, Artificial Sequence
  source: /note="Description of Artificial Sequence: Synthetic oligonucleotide"
ugaagccgcucg

SEQ ID NO: 967 - RNA, 11 nt, Artificial Sequence
  source: /note="Description of Artificial Sequence: Synthetic oligonucleotide"
acgccagucaa

SEQ ID NO: 968 - RNA, 12 nt, Artificial Sequence
  source: /note="Description of Artificial Sequence: Synthetic oligonucleotide"
ucuuggugcgug

SEQ ID NO: 969 - RNA, 13 nt, Artificial Sequence
  source: /note="Description of Artificial Sequence: Synthetic oligonucleotide"
uuggauucaucag

SEQ ID NO: 970 - RNA, 12 nt, Artificial Sequence
  source: /note="Description of Artificial Sequence: Synthetic oligonucleotide"
ggaauaccuaag

SEQ ID NO: 971 - RNA, 11 nt, Artificial Sequence
  source: /note="Description of Artificial Sequence: Synthetic oligonucleotide"
uuugaggcuca

SEQ ID NO: 972 - RNA, 10 nt, Artificial Sequence
  source: /note="Description of Artificial Sequence: Synthetic oligonucleotide"
cuacaauugg

SEQ ID NO: 973 - RNA, 11 nt, Artificial Sequence
  source: /note="Description of Artificial Sequence: Synthetic oligonucleotide"
aguuaggagcc

SEQ ID NO: 974 - RNA, 12 nt, Artificial Sequence
  source: /note="Description of Artificial Sequence: Synthetic oligonucleotide"
gucaauauccac

SEQ ID NO: 975 - RNA, 12 nt, Artificial Sequence
  source: /note="Description of Artificial Sequence: Synthetic oligonucleotide"
uguucagucaca

SEQ ID NO: 976 - RNA, 11 nt, Artificial Sequence
  source: /note="Description of Artificial Sequence: Synthetic oligonucleotide"
cacacacauac

SEQ ID NO: 977 - RNA, 11 nt, Artificial Sequence
  source: /note="Description of Artificial Sequence: Synthetic oligonucleotide"
uccuuuugcuu

SEQ ID NO: 978 - RNA, 15 nt, Artificial Sequence
  source: /note="Description of Artificial Sequence: Synthetic oligonucleotide"
uuuaaaguaauuuuu

SEQ ID NO: 979 - RNA, 12 nt, Artificial Sequence
  source: /note="Description of Artificial Sequence: Synthetic oligonucleotide"
aacagucaaugg

SEQ ID NO: 980 - RNA, 12 nt, Artificial Sequence
  source: /note="Description of Artificial Sequence: Synthetic oligonucleotide"
cgacaaaccaau

SEQ ID NO: 981 - RNA, 11 nt, Artificial Sequence
  source: /note="Description of Artificial Sequence: Synthetic oligonucleotide"
cugcuaccacu

SEQ ID NO: 982 - RNA, 12 nt, Artificial Sequence
  source: /note="Description of Artificial Sequence: Synthetic oligonucleotide"
caagcggucuua

SEQ ID NO: 983 - RNA, 12 nt, Artificial Sequence
  source: /note="Description of Artificial Sequence: Synthetic oligonucleotide"
gucuuaccggcu

SEQ ID NO: 984 - RNA, 10 nt, Artificial Sequence
  source: /note="Description of Artificial Sequence: Synthetic oligonucleotide"
auggguuacc

SEQ ID NO: 985 - RNA, 10 nt, Artificial Sequence
  source: /note="Description of Artificial Sequence: Synthetic oligonucleotide"
uuaccugcga

SEQ ID NO: 986 - RNA, 11 nt, Artificial Sequence
  source: /note="Description of Artificial Sequence: Synthetic oligonucleotide"
aucuugcugag

SEQ ID NO: 987 - RNA, 12 nt, Artificial Sequence
  source: /note="Description of Artificial Sequence: Synthetic oligonucleotide"
gcauaaaacagu

SEQ ID NO: 988 - RNA, 11 nt, Artificial Sequence
  source: /note="Description of Artificial Sequence: Synthetic oligonucleotide"
uccuuuauccu

SEQ ID NO: 989 - RNA, 11 nt, Artificial Sequence
  source: /note="Description of Artificial Sequence: Synthetic oligonucleotide"
aacgcaaguug

SEQ ID NO: 990 - RNA, 12 nt, Artificial Sequence
  source: /note="Description of Artificial Sequence: Synthetic oligonucleotide"
aacugaaaccau

SEQ ID NO: 991 - RNA, 13 nt, Artificial Sequence
  source: /note="Description of Artificial Sequence: Synthetic oligonucleotide"
cuuuguuaaauau

SEQ ID NO: 992 - RNA, 13 nt, Artificial Sequence
  source: /note="Description of Artificial Sequence: Synthetic oligonucleotide"
uauauuaaaaguu

SEQ ID NO: 993 - RNA, 12 nt, Artificial Sequence
  source: /note="Description of Artificial Sequence: Synthetic oligonucleotide"
uuuugacuuaac

SEQ ID NO: 994 - RNA, 12 nt, Artificial Sequence
  source: /note="Description of Artificial Sequence: Synthetic oligonucleotide"
caaacucagcac

SEQ ID NO: 995 - RNA, 10 nt, Artificial Sequence
  source: /note="Description of Artificial Sequence: Synthetic oligonucleotide"
gcugaccuca

SEQ ID NO: 996 - RNA, 13 nt, Artificial Sequence
  source: /note="Description of Artificial Sequence: Synthetic oligonucleotide"
uuauucagaucgc

SEQ ID NO: 997 - RNA, 12 nt, Artificial Sequence
  source: /note="Description of Artificial Sequence: Synthetic oligonucleotide"
ggguucugggau

SEQ ID NO: 998 - RNA, 14 nt, Artificial Sequence
  source: /note="Description of Artificial Sequence: Synthetic oligonucleotide"
uauuggaaauuaug

SEQ ID NO: 999 - RNA, 12 nt, Artificial Sequence
  source: /note="Description of Artificial Sequence: Synthetic oligonucleotide"
uggaagcacuag

SEQ ID NO: 1000 - RNA, 12 nt, Artificial Sequence
  source: /note="Description of Artificial Sequence: Synthetic oligonucleotide"
uuuuuaugugga

SEQ ID NO: 1001 - RNA, 11 nt, Artificial Sequence
  source: /note="Description of Artificial Sequence: Synthetic oligonucleotide"
gaauugguaga

SEQ ID NO: 1002 - RNA, 12 nt, Artificial Sequence
  source: /note="Description of Artificial Sequence: Synthetic oligonucleotide"
uagacuuggaga

SEQ ID NO: 1003 - RNA, 12 nt, Artificial Sequence
  source: /note="Description of Artificial Sequence: Synthetic oligonucleotide"
uacaguauucca

SEQ ID NO: 1004 - RNA, 14 nt, Artificial Sequence
  source: /note="Description of Artificial Sequence: Synthetic oligonucleotide"
cacugaugaauuaa

SEQ ID NO: 1005 - RNA, 11 nt, Artificial Sequence
  source: /note="Description of Artificial Sequence: Synthetic oligonucleotide"
cacaucaucac

SEQ ID NO: 1006 - RNA, 12 nt, Artificial Sequence
  source: /note="Description of Artificial Sequence: Synthetic oligonucleotide"
ucaccaaacaga

SEQ ID NO: 1007 - RNA, 11 nt, Artificial Sequence
  source: /note="Description of Artificial Sequence: Synthetic oligonucleotide"
gaacaugaugg

SEQ ID NO: 1008 - RNA, 11 nt, Artificial Sequence
  source: /note="Description of Artificial Sequence: Synthetic oligonucleotide"
auguagacugc

SEQ ID NO: 1009 - RNA, 12 nt, Artificial Sequence
  source: /note="Description of Artificial Sequence: Synthetic oligonucleotide"
gaucuauuuaug

SEQ ID NO: 1010 - RNA, 11 nt, Artificial Sequence
  source: /note="Description of Artificial Sequence: Synthetic oligonucleotide"
cacuauuauca

SEQ ID NO: 1011 - RNA, 10 nt, Artificial Sequence
  source: /note="Description of Artificial Sequence: Synthetic oligonucleotide"
ucaguucugc

SEQ ID NO: 1012 - RNA, 12 nt, Artificial Sequence
  source: /note="Description of Artificial Sequence: Synthetic oligonucleotide"
gauuaaaccuac

SEQ ID NO: 1013 - RNA, 12 nt, Artificial Sequence
  source: /note="Description of Artificial Sequence: Synthetic oligonucleotide"
uaaaauccuucu

SEQ ID NO: 1014 - RNA, 11 nt, Artificial Sequence
  source: /note="Description of Artificial Sequence: Synthetic oligonucleotide"
augcuguagac

SEQ ID NO: 1015 - RNA, 12 nt, Artificial Sequence
  source: /note="Description of Artificial Sequence: Synthetic oligonucleotide"
ugauaggaauag

SEQ ID NO: 1016 - RNA, 10 nt, Artificial Sequence
  source: /note="Description of Artificial Sequence: Synthetic oligonucleotide"
auggcccuga

SEQ ID NO: 1017 - RNA, 10 nt, Artificial Sequence
  source: /note="Description of Artificial Sequence: Synthetic oligonucleotide"
uccucaagca

SEQ ID NO: 1018 - RNA, 9 nt, Artificial Sequence
  source: /note="Description of Artificial Sequence: Synthetic oligonucleotide"
uucagccca

SEQ ID NO: 1019 - RNA, 10 nt, Artificial Sequence
  source: /note="Description of Artificial Sequence: Synthetic oligonucleotide"
cugcugaacc

SEQ ID NO: 1020 - RNA, 11 nt, Artificial Sequence
  source: /note="Description of Artificial Sequence: Synthetic oligonucleotide"
aguucucuuca

SEQ ID NO: 1021 - RNA, 10 nt, Artificial Sequence
  source: /note="Description of Artificial Sequence: Synthetic oligonucleotide"
cagccuagag

SEQ ID NO: 1022 - RNA, 12 nt, Artificial Sequence
  source: /note="Description of Artificial Sequence: Synthetic oligonucleotide"
ucugugaagugu

SEQ ID NO: 1023 - RNA, 13 nt, Artificial Sequence
  source: /note="Description of Artificial Sequence: Synthetic oligonucleotide"
gagaaaauuucaa

SEQ ID NO: 1024 - RNA, 10 nt, Artificial Sequence
  source: /note="Description of Artificial Sequence: Synthetic oligonucleotide"
auccuccuga

SEQ ID NO: 1025 - RNA, 11 nt, Artificial Sequence
  source: /note="Description of Artificial Sequence: Synthetic oligonucleotide"
ugacaucauau

SEQ ID NO: 1026 - RNA, 12 nt, Artificial Sequence
  source: /note="Description of Artificial Sequence: Synthetic oligonucleotide"
aucuucaucaua

SEQ ID NO: 1027 - RNA, 12 nt, Artificial Sequence
  source: /note="Description of Artificial Sequence: Synthetic oligonucleotide"
acuagcuauuaa

SEQ ID NO: 1028 - RNA, 13 nt, Artificial Sequence
  source: /note="Description of Artificial Sequence: Synthetic oligonucleotide"
cucuacuaaaaau

SEQ ID NO: 1029 - RNA, 11 nt, Artificial Sequence
  source: /note="Description of Artificial Sequence: Synthetic oligonucleotide"
cuaucucgccu

SEQ ID NO: 1030 - RNA, 12 nt, Artificial Sequence
  source: /note="Description of Artificial Sequence: Synthetic oligonucleotide"
uucgguccaguu

SEQ ID NO: 1031 - RNA, 10 nt, Artificial Sequence
  source: /note="Description of Artificial Sequence: Synthetic oligonucleotide"
auguagccgc

SEQ ID NO: 1032 - RNA, 11 nt, Artificial Sequence
  source: /note="Description of Artificial Sequence: Synthetic oligonucleotide"
gaggagacuug

SEQ ID NO: 1033 - RNA, 11 nt, Artificial Sequence
  source: /note="Description of Artificial Sequence: Synthetic oligonucleotide"
aguagugagga

SEQ ID NO: 1034 - RNA, 13 nt, Artificial Sequence
  source: /note="Description of Artificial Sequence: Synthetic oligonucleotide"
agaugaguacaaa

SEQ ID NO: 1035 - RNA, 12 nt, Artificial Sequence
  source: /note="Description of Artificial Sequence: Synthetic oligonucleotide"
uuguuaaugggc

SEQ ID NO: 1036 - RNA, 12 nt, Artificial Sequence
  source: /note="Description of Artificial Sequence: Synthetic oligonucleotide"
uuuuaauuuauu

SEQ ID NO: 1037 - RNA, 11 nt, Artificial Sequence
  source: /note="Description of Artificial Sequence: Synthetic oligonucleotide"
auuuaaauaug

SEQ ID NO: 1038 - RNA, 12 nt, Artificial Sequence
  source: /note="Description of Artificial Sequence: Synthetic oligonucleotide"
auccuuuguuuc

SEQ ID NO: 1039 - RNA, 13 nt, Artificial Sequence
  source: /note="Description of Artificial Sequence: Synthetic oligonucleotide"
gucuaaguguuug

SEQ ID NO: 1040 - RNA, 11 nt, Artificial Sequence
  source: /note="Description of Artificial Sequence: Synthetic oligonucleotide"
ccugugacaaa

SEQ ID NO: 1041 - RNA, 12 nt, Artificial Sequence
  source: /note="Description of Artificial Sequence: Synthetic oligonucleotide"
caggcugaauua

SEQ ID NO: 1042 - RNA, 13 nt, Artificial Sequence
  source: /note="Description of Artificial Sequence: Synthetic oligonucleotide"
ucauucuuacaau

SEQ ID NO: 1043 - RNA, 14 nt, Artificial Sequence
  source: /note="Description of Artificial Sequence: Synthetic oligonucleotide"
cauucuuacaauug

SEQ ID NO: 1044 - RNA, 11 nt, Artificial Sequence
  source: /note="Description of Artificial Sequence: Synthetic oligonucleotide"
agagaguguac

SEQ ID NO: 1045 - RNA, 11 nt, Artificial Sequence
  source: /note="Description of Artificial Sequence: Synthetic oligonucleotide"
gaacucagcag

SEQ ID NO: 1046 - RNA, 12 nt, Artificial Sequence
  source: /note="Description of Artificial Sequence: Synthetic oligonucleotide"
uuauuuucagua

SEQ ID NO: 1047 - RNA, 11 nt, Artificial Sequence
  source: /note="Description of Artificial Sequence: Synthetic oligonucleotide"
cuuaaauggaa

SEQ ID NO: 1048 - RNA, 12 nt, Artificial Sequence
  source: /note="Description of Artificial Sequence: Synthetic oligonucleotide"
gccuaaaauugu

SEQ ID NO: 1049 - RNA, 12 nt, Artificial Sequence
  source: /note="Description of Artificial Sequence: Synthetic oligonucleotide"
acuaacaucugg

SEQ ID NO: 1050 - RNA, 11 nt, Artificial Sequence
  source: /note="Description of Artificial Sequence: Synthetic oligonucleotide"
gacugugagcu

SEQ ID NO: 1051 - RNA, 13 nt, Artificial Sequence
  source: /note="Description of Artificial Sequence: Synthetic oligonucleotide"
gcuuuuuauuaau

SEQ ID NO: 1052 - RNA, 12 nt, Artificial Sequence
  source: /note="Description of Artificial Sequence: Synthetic oligonucleotide"
ucuucuuacauu

SEQ ID NO: 1053 - RNA, 14 nt, Artificial Sequence
  source: /note="Description of Artificial Sequence: Synthetic oligonucleotide"
auuuguaaaaaugu

SEQ ID NO: 1054 - RNA, 14 nt, Artificial Sequence
  source: /note="Description of Artificial Sequence: Synthetic oligonucleotide"
ucuuaauucauauu

SEQ ID NO: 1055 - RNA, 12 nt, Artificial Sequence
  source: /note="Description of Artificial Sequence: Synthetic oligonucleotide"
aacuaaucauga

SEQ ID NO: 1056 - RNA, 11 nt, Artificial Sequence
  source: /note="Description of Artificial Sequence: Synthetic oligonucleotide"
cugcucuuggg

SEQ ID NO: 1057 - RNA, 12 nt, Artificial Sequence
  source: /note="Description of Artificial Sequence: Synthetic oligonucleotide"
aguagcuuugag

SEQ ID NO: 1058 - RNA, 13 nt, Artificial Sequence
  source: /note="Description of Artificial Sequence: Synthetic oligonucleotide"
acguaauauuuca

SEQ ID NO: 1059 - RNA, 12 nt, Artificial Sequence
  source: /note="Description of Artificial Sequence: Synthetic oligonucleotide"
auucucuucacu

SEQ ID NO: 1060 - RNA, 13 nt, Artificial Sequence
  source: /note="Description of Artificial Sequence: Synthetic oligonucleotide"
uaaugcuaagaaa

SEQ ID NO: 1061 - RNA, 11 nt, Artificial Sequence
  source: /note="Description of Artificial Sequence: Synthetic oligonucleotide"
cugaaaaucaa

SEQ ID NO: 1062 - RNA, 13 nt, Artificial Sequence
  source: /note="Description of Artificial Sequence: Synthetic oligonucleotide"
auaugauuacuuu

SEQ ID NO: 1063 - RNA, 13 nt, Artificial Sequence
  source: /note="Description of Artificial Sequence: Synthetic oligonucleotide"
auuuuguucuaca

SEQ ID NO: 1064 - RNA, 11 nt, Artificial Sequence
  source: /note="Description of Artificial Sequence: Synthetic oligonucleotide"
ccgggacucuc

SEQ ID NO: 1065 - RNA, 13 nt, Artificial Sequence
  source: /note="Description of Artificial Sequence: Synthetic oligonucleotide"
cuuuaaaguaaag

SEQ ID NO: 1066 - RNA, 12 nt, Artificial Sequence
  source: /note="Description of Artificial Sequence: Synthetic oligonucleotide"
cuggaagccugg

SEQ ID NO: 1067 - RNA, 13 nt, Artificial Sequence
  source: /note="Description of Artificial Sequence: Synthetic oligonucleotide"
aaacaaaagagag

SEQ ID NO: 1068 - RNA, 12 nt, Artificial Sequence
  source: /note="Description of Artificial Sequence: Synthetic oligonucleotide"
ucaguuaugccg

SEQ ID NO: 1069 - RNA, 12 nt, Artificial Sequence
  source: /note="Description of Artificial Sequence: Synthetic oligonucleotide"
aaaagaagucca

SEQ ID NO: 1070 - RNA, 10 nt, Artificial Sequence
  source: /note="Description of Artificial Sequence: Synthetic oligonucleotide"
ggugagguua

SEQ ID NO: 1071 - RNA, 10 nt, Artificial Sequence
  source: /note="Description of Artificial Sequence: Synthetic oligonucleotide"
ggaagaggac

SEQ ID NO: 1072 - RNA, 12 nt, Artificial Sequence
  source: /note="Description of Artificial Sequence: Synthetic oligonucleotide"
agcaaguauugu

SEQ ID NO: 1073 - RNA, 11 nt, Artificial Sequence
  source: /note="Description of Artificial Sequence: Synthetic oligonucleotide"
uuguagcacuc

SEQ ID NO: 1074 - RNA, 13 nt, Artificial Sequence
  source: /note="Description of Artificial Sequence: Synthetic oligonucleotide"
caaaaccacaaau

SEQ ID NO: 1075 - RNA, 11 nt, Artificial Sequence
  source: /note="Description of Artificial Sequence: Synthetic oligonucleotide"
aagcccauaca

SEQ ID NO: 1076 - RNA, 10 nt, Artificial Sequence
  source: /note="Description of Artificial Sequence: Synthetic oligonucleotide"
gcccauacag

SEQ ID NO: 1077 - RNA, 11 nt, Artificial Sequence
  source: /note="Description of Artificial Sequence: Synthetic oligonucleotide"
agaaaccuucc

SEQ ID NO: 1078 - RNA, 9 nt, Artificial Sequence
  source: /note="Description of Artificial Sequence: Synthetic oligonucleotide"
uauaccuac

SEQ ID NO: 1079 - RNA, 12 nt, Artificial Sequence
  source: /note="Description of Artificial Sequence: Synthetic oligonucleotide"
ccaguuuucgga

SEQ ID NO: 1080 - RNA, 8 nt, Artificial Sequence
  source: /note="Description of Artificial Sequence: Synthetic oligonucleotide"
gaacaggg

SEQ ID NO: 1081 - RNA, 12 nt, Artificial Sequence
  source: /note="Description of Artificial Sequence: Synthetic oligonucleotide"
uaacuuuccagu

SEQ ID NO: 1082 - RNA, 13 nt, Artificial Sequence
  source: /note="Description of Artificial Sequence: Synthetic oligonucleotide"
aaguuugguuuug

SEQ ID NO: 1083 - RNA, 11 nt, Artificial Sequence
  source: /note="Description of Artificial Sequence: Synthetic oligonucleotide"
uucccacugua

SEQ ID NO: 1084 - RNA, 12 nt, Artificial Sequence
  source: /note="Description of Artificial Sequence: Synthetic oligonucleotide"
gauaccauauga

SEQ ID NO: 1085 - RNA, 10 nt, Artificial Sequence
  source: /note="Description of Artificial Sequence: Synthetic oligonucleotide"
acaugggcug

SEQ ID NO: 1086 - RNA, 12 nt, Artificial Sequence
  source: /note="Description of Artificial Sequence: Synthetic oligonucleotide"
aacuuuuucaua

SEQ ID NO: 1087 - RNA, 11 nt, Artificial Sequence
  source: /note="Description of Artificial Sequence: Synthetic oligonucleotide"
augaggccgga

SEQ ID NO: 1088 - RNA, 10 nt, Artificial Sequence
  source: /note="Description of Artificial Sequence: Synthetic oligonucleotide"
cugcauuugu

SEQ ID NO: 1089 - RNA, 12 nt, Artificial Sequence
  source: /note="Description of Artificial Sequence: Synthetic oligonucleotide"
auguuuacuacc

SEQ ID NO: 1090 - RNA, 14 nt, Artificial Sequence
  source: /note="Description of Artificial Sequence: Synthetic oligonucleotide"
auuuuuugaugaaa

SEQ ID NO: 1091 - RNA, 13 nt, Artificial Sequence
  source: /note="Description of Artificial Sequence: Synthetic oligonucleotide"
agugugugaauuu

SEQ ID NO: 1092 - RNA, 12 nt, Artificial Sequence
  source: /note="Description of Artificial Sequence: Synthetic oligonucleotide"
agcaauguaugu

SEQ ID NO: 1093 - RNA, 13 nt, Artificial Sequence
  source: /note="Description of Artificial Sequence: Synthetic oligonucleotide"
aagcacauauaua

SEQ ID NO: 1094 - RNA, 13 nt, Artificial Sequence
  source: /note="Description of Artificial Sequence: Synthetic oligonucleotide"
uaauaguuucucc

SEQ ID NO: 1095 - RNA, 12 nt, Artificial Sequence
  source: /note="Description of Artificial Sequence: Synthetic oligonucleotide"
guuucuccaaau

SEQ ID NO: 1096 - RNA, 12 nt, Artificial Sequence
  source: /note="Description of Artificial Sequence: Synthetic oligonucleotide"
acuuccuagaaa

SEQ ID NO: 1097 - RNA, 12 nt, Artificial Sequence
  source: /note="Description of Artificial Sequence: Synthetic oligonucleotide"
acaccauauaug

SEQ ID NO: 1098 - RNA, 13 nt, Artificial Sequence
  source: /note="Description of Artificial Sequence: Synthetic oligonucleotide"
uauaugaauggag

SEQ ID NO: 1099 - RNA, 12 nt, Artificial Sequence
  source: /note="Description of Artificial Sequence: Synthetic oligonucleotide"
cauuuacaggga

SEQ ID NO: 1100 - RNA, 12 nt, Artificial Sequence
  source: /note="Description of Artificial Sequence: Synthetic oligonucleotide"
auuuacagggac

SEQ ID NO: 1101 - RNA, 9 nt, Artificial Sequence
  source: /note="Description of Artificial Sequence: Synthetic oligonucleotide"
gggaccuga

SEQ ID NO: 1102 - RNA, 13 nt, Artificial Sequence
  source: /note="Description of Artificial Sequence: Synthetic oligonucleotide"
guuugacugcauc

SEQ ID NO: 1103 - RNA, 12 nt, Artificial Sequence
  source: /note="Description of Artificial Sequence: Synthetic oligonucleotide"
uugacugcaucg

SEQ ID NO: 1104 - RNA, 11 nt, Artificial Sequence
  source: /note="Description of Artificial Sequence: Synthetic oligonucleotide"
aguucacaggg

SEQ ID NO: 1105 - RNA, 12 nt, Artificial Sequence
  source: /note="Description of Artificial Sequence: Synthetic oligonucleotide"
gcaccucugucc

SEQ ID NO: 1106 - RNA, 14 nt, Artificial Sequence
  source: /note="Description of Artificial Sequence: Synthetic oligonucleotide"
guuugucuuuuuaa

SEQ ID NO: 1107 - RNA, 13 nt, Artificial Sequence
  source: /note="Description of Artificial Sequence: Synthetic oligonucleotide"
uugucuuuuuaag

SEQ ID NO: 1108 - RNA, 12 nt, Artificial Sequence
  source: /note="Description of Artificial Sequence: Synthetic oligonucleotide"
cuaaagguuguc

SEQ ID NO: 1109 - RNA, 11 nt, Artificial Sequence
  source: /note="Description of Artificial Sequence: Synthetic oligonucleotide"
agguugucgac

SEQ ID NO: 1110 - RNA, 12 nt, Artificial Sequence
  source: /note="Description of Artificial Sequence: Synthetic oligonucleotide"
ccuggcaauugu

SEQ ID NO: 1111 - RNA, 11 nt, Artificial Sequence
  source: /note="Description of Artificial Sequence: Synthetic oligonucleotide"
guggugcgagg

SEQ ID NO: 1112 - RNA, 12 nt, Artificial Sequence
  source: /note="Description of Artificial Sequence: Synthetic oligonucleotide"
gagacaugaaau

SEQ ID NO: 1113 - RNA, 12 nt, Artificial Sequence
  source: /note="Description of Artificial Sequence: Synthetic oligonucleotide"
uauauuucucca

SEQ ID NO: 1114 - RNA, 9 nt, Artificial Sequence
  source: /note="Description of Artificial Sequence: Synthetic oligonucleotide"
augaaggcu

SEQ ID NO: 1115 - RNA, 10 nt, Artificial Sequence
  source: /note="Description of Artificial Sequence: Synthetic oligonucleotide"
cuggaguggu

SEQ ID NO: 1116 - RNA, 10 nt, Artificial Sequence
  source: /note="Description of Artificial Sequence: Synthetic oligonucleotide"
ggaagagagg

SEQ ID NO: 1117 - RNA, 11 nt, Artificial Sequence
  source: /note="Description of Artificial Sequence: Synthetic oligonucleotide"
uugcaucgggc

SEQ ID NO: 1118 - RNA, 12 nt, Artificial Sequence
  source: /note="Description of Artificial Sequence: Synthetic oligonucleotide"
uauccuacugug

SEQ ID NO: 1119 - RNA, 12 nt, Artificial Sequence
  source: /note="Description of Artificial Sequence: Synthetic oligonucleotide"
ccuacuguguaa

SEQ ID NO: 1120 - RNA, 11 nt, Artificial Sequence
  source: /note="Description of Artificial Sequence: Synthetic oligonucleotide"
cuuguagugua

SEQ ID NO: 1121 - RNA, 12 nt, Artificial Sequence
  source: /note="Description of Artificial Sequence: Synthetic oligonucleotide"
cuuuguugauug

SEQ ID NO: 1122 - RNA, 13 nt, Artificial Sequence
  source: /note="Description of Artificial Sequence: Synthetic oligonucleotide"
uuguugauugaaa

SEQ ID NO: 1123 - RNA, 14 nt, Artificial Sequence
  source: /note="Description of Artificial Sequence: Synthetic oligonucleotide"
ucuuuuucuuccau

SEQ ID NO: 1124 - RNA, 12 nt, Artificial Sequence
  source: /note="Description of Artificial Sequence: Synthetic oligonucleotide"
aucuuccuucua

SEQ ID NO: 1125 - RNA, 12 nt, Artificial Sequence
  source: /note="Description of Artificial Sequence: Synthetic oligonucleotide"
ugaaugcuucau

SEQ ID NO: 1126 - RNA, 12 nt, Artificial Sequence
  source: /note="Description of Artificial Sequence: Synthetic oligonucleotide"
gaaugcuucaug

SEQ ID NO: 1127 - RNA, 12 nt, Artificial Sequence
  source: /note="Description of Artificial Sequence: Synthetic oligonucleotide"
auucuacuuuga

SEQ ID NO: 1128 - RNA, 12 nt, Artificial Sequence
  source: /note="Description of Artificial Sequence: Synthetic oligonucleotide"
gcaacuacagac

SEQ ID NO: 1129 - RNA, 12 nt, Artificial Sequence
  source: /note="Description of Artificial Sequence: Synthetic oligonucleotide"
accaaggucaac

SEQ ID NO: 1130 - RNA, 12 nt, Artificial Sequence
  source: /note="Description of Artificial Sequence: Synthetic oligonucleotide"
gacuaucucgac

SEQ ID NO: 1131 - RNA, 12 nt, Artificial Sequence
  source: /note="Description of Artificial Sequence: Synthetic oligonucleotide"
accuucccaaac

SEQ ID NO: 1132 - RNA, 13 nt, Artificial Sequence
  source: /note="Description of Artificial Sequence: Synthetic oligonucleotide"
caagcuuagaacu

SEQ ID NO: 1133 - RNA, 14 nt, Artificial Sequence
  source: /note="Description of Artificial Sequence: Synthetic oligonucleotide"
gcuuagaacuuuaa

SEQ ID NO: 1134 - RNA, 13 nt, Artificial Sequence
  source: /note="Description of Artificial Sequence: Synthetic oligonucleotide"
aacuuuaagcaac

SEQ ID NO: 1135 - RNA, 10 nt, Artificial Sequence
  source: /note="Description of Artificial Sequence: Synthetic oligonucleotide"
agaccaccac

SEQ ID NO: 1136 - RNA, 13 nt, Artificial Sequence
  source: /note="Description of Artificial Sequence: Synthetic oligonucleotide"
cgagaaauaaagu

SEQ ID NO: 1137 - RNA, 13 nt, Artificial Sequence
  source: /note="Description of Artificial Sequence: Synthetic oligonucleotide"
gagaaauaaaguu

SEQ ID NO: 1138 - RNA, 11 nt, Artificial Sequence
  source: /note="Description of Artificial Sequence: Synthetic oligonucleotide"
ggaaaugaucc

SEQ ID NO: 1139 - RNA, 12 nt, Artificial Sequence
  source: /note="Description of Artificial Sequence: Synthetic oligonucleotide"
aagaaaugaaac

SEQ ID NO: 1140 - RNA, 12 nt, Artificial Sequence
  source: /note="Description of Artificial Sequence: Synthetic oligonucleotide"
uuuccauccucc

SEQ ID NO: 1141 - RNA, 14 nt, Artificial Sequence
  source: /note="Description of Artificial Sequence: Synthetic oligonucleotide"
cugaaaaucuuuga

SEQ ID NO: 1142 - RNA, 10 nt, Artificial Sequence
  source: /note="Description of Artificial Sequence: Synthetic oligonucleotide"
gccguucagg

SEQ ID NO: 1143 - RNA, 12 nt, Artificial Sequence
  source: /note="Description of Artificial Sequence: Synthetic oligonucleotide"
aggguccagaag

SEQ ID NO: 1144 - RNA, 12 nt, Artificial Sequence
  source: /note="Description of Artificial Sequence: Synthetic oligonucleotide"
caagacugcuug

SEQ ID NO: 1145 - RNA, 12 nt, Artificial Sequence
  source: /note="Description of Artificial Sequence: Synthetic oligonucleotide"
ccaugucuuugg

SEQ ID NO: 1146 - RNA, 10 nt, Artificial Sequence
  source: /note="Description of Artificial Sequence: Synthetic oligonucleotide"
ccugaaacac

SEQ ID NO: 1147 - RNA, 11 nt, Artificial Sequence
  source: /note="Description of Artificial Sequence: Synthetic oligonucleotide"
cucuguaccuc

SEQ ID NO: 1148 - RNA, 11 nt, Artificial Sequence
  source: /note="Description of Artificial Sequence: Synthetic oligonucleotide"
gcaagacaaga

SEQ ID NO: 1149 - RNA, 12 nt, Artificial Sequence
  source: /note="Description of Artificial Sequence: Synthetic oligonucleotide"
caagacaagaaa

SEQ ID NO: 1150 - RNA, 11 nt, Artificial Sequence
  source: /note="Description of Artificial Sequence: Synthetic oligonucleotide"
guacaagaucc

SEQ ID NO: 1151 - RNA, 11 nt, Artificial Sequence
  source: /note="Description of Artificial Sequence: Synthetic oligonucleotide"
guacuugcaga

SEQ ID NO: 1152 - RNA, 12 nt, Artificial Sequence
  source: /note="Description of Artificial Sequence: Synthetic oligonucleotide"
gaucgauacaga

SEQ ID NO: 1153 - RNA, 12 nt, Artificial Sequence
  source: /note="Description of Artificial Sequence: Synthetic oligonucleotide"
auaaaaauaaau

SEQ ID NO: 1154 - RNA, 12 nt, Artificial Sequence
  source: /note="Description of Artificial Sequence: Synthetic oligonucleotide"
aaaaauaaauau

SEQ ID NO: 1155 - RNA, 12 nt, Artificial Sequence
  source: /note="Description of Artificial Sequence: Synthetic oligonucleotide"
uugacugcugug

SEQ ID NO: 1156 - RNA, 12 nt, Artificial Sequence
  source: /note="Description of Artificial Sequence: Synthetic oligonucleotide"
gagaugagagac

SEQ ID NO: 1157 - RNA, 9 nt, Artificial Sequence
  source: /note="Description of Artificial Sequence: Synthetic oligonucleotide"
cccacuugg

SEQ ID NO: 1158 - DNA, 2724 bp, Homo sapiens
cccagaaggccgcggggggtggaccgcctaagagggcgtgcgctcccgacatgccccgcggcgcgccattaaccgccagatttgaatcgcgggacccgttggcagaggtggcggcggcggcatgggtgccccgacgttgccccctgcctggcagccctttctcaaggaccaccgcatctctacattcaagaactggcccttcttggagggctgcgcctgcaccccggagcggatggccgaggctggcttcatccactgccccactgagaacgagccagacttggcccagtgtttcttctgcttcaaggagctggaaggctgggagccagatgacgaccccattgggccgggcacggtggcttacgcctgtaataccagcactttgggaggccgaggcgggcggatcacgagagaggaacataaaaagcattcgtccggttgcgctttcctttctgtcaagaagcagtttgaagaattaacccttggtgaatttttgaaactggacagagaaagagccaagaacaaaattgcaaaggaaaccaacaataagaagaaagaatttgaggaaactgcggagaaagtgcgccgtgccatcgagcagctggctgccatggattgaggcctctggccggagctgcctggtcccagagtggctgcaccacttccagggtttattccctggtgccaccagccttcctgtgggccccttagcaatgtcttaggaaaggagatcaacattttcaaattagatgtttcaactgtgctcttgttttgtcttgaaagtggcaccagaggtgcttctgcctgtgcagcgggtgctgctggtaacagtggctgcttctctctctctctctcttttttgggggctcatttttgctgttttgattcccgggcttaccaggtgagaagtgagggaggaagaaggcagtgtcccttttgctagagctgacagctttgttcgcgtgggcagagccttccacagtgaatgtgtctggacctcatgttgttgaggctgtcacagtcctgagtgtggacttggcaggtgcctgttgaatctgagctgcaggttccttatctgtcacacctgtgcctcctcagaggacagtttttttgttgttgtgtttttttgtttttttttttttggtagatgcatgacttgtgtgtgatgagagaatggagacagagtccctggctcctctactgtttaacaacatggctttcttattttgtttgaattgttaattcacagaatagcacaaactacaattaaaactaagcacaaagccattctaagtcattggggaaacggggtgaacttcaggtggatgaggagacagaatagagtgataggaagcgtctggcagatactccttttgccactgctgtgtgattagacaggcccagtgagccgcggggcacatgctggccgctcctccctcagaaaaaggcagtggcctaaatcctttttaaatgacttggctcgatgctgtgggggactggctgggctgctgcaggccgtgtgtctgtcagcccaaccttcacatctgtcacgttctccacacgggggagagacgcagtccgcccaggtccccgctttctttggaggcagcagctcccgcagggctgaagtctggcgtaagatgatggatttgattcgccctcctccctgtcatagagctgcagggtggattgttacagcttcgctggaaacctctggaggtcatctcggctgttcctgagaaataaaaagcctgtcatttcaaacactgctgtggaccctactgggtttttaaaatattgtcagtttttcatcgtcgtccctagcctgccaacagccatctgcccagacagccgcagtgaggatgagcgtcctggcagagacgcagttgtctctgggcgcttgccagagccacgaaccccagacctgtttgtatcatccgggctccttccgggcagaaacaactgaaaatgcacttcagacccacttatttctgccacatctgagtcggcctgagatagacttttccctctaaactgggagaatatcacagtggtttttgttagcagaaaatgcactccagcctctgtactcatctaagctgcttatttttgatatttgtgtcagtctgtaaatggatacttcactttaataactgttgcttagtaattggctttgtagagaagctggaaaaaaatggttttgtcttcaactcctttgcatgccaggcggtgatgtggatctcggcttctgtgagcctgtgctgtgggcagggctgagctggagccgcccctctcagcccgcctgccacggcctttccttaaaggccatccttaaaaccagaccctcatggctaccagcacctgaaagcttcctcgacatctgttaataaagccgtaggcccttgtctaagtgcaaccgcctagactttctttcagatacatgtccacatgtccatttttcaggttctctaagttggagtggagtctgggaagggttgtgaatgaggcttctgggctatgggtgaggttccaatggcaggttagagcccctcgggccaactgccatcctggaaagtagagacagcagtgcccgctgcccagaagagaccagcaagccaaactggagcccccattgcaggctgtcgccatgtggaaagagtaactcacaattgccaataaagtctcatgtggttttatctaaaaaaaaaaaaaaaaaaaaaaaaa

SEQ ID NO: 1159 - DNA, 2537 bp, Homo sapiens
cccagaaggccgcggggggtggaccgcctaagagggcgtgcgctcccgacatgccccgcggcgcgccattaaccgccagatttgaatcgcgggacccgttggcagaggtggcggcggcggcatgggtgccccgacgttgccccctgcctggcagccctttctcaaggaccaccgcatctctacattcaagaactggcccttcttggagggctgcgcctgcaccccggagcggatggccgaggctggcttcatccactgccccactgagaacgagccagacttggcccagtgtttcttctgcttcaaggagctggaaggctgggagccagatgacgaccccatgcaaaggaaaccaacaataagaagaaagaatttgaggaaactgcggagaaagtgcgccgtgccatcgagcagctggctgccatggattgaggcctctggccggagctgcctggtcccagagtggctgcaccacttccagggtttattccctggtgccaccagccttcctgtgggccccttagcaatgtcttaggaaaggagatcaacattttcaaattagatgtttcaactgtgctcttgttttgtcttgaaagtggcaccagaggtgcttctgcctgtgcagcgggtgctgctggtaacagtggctgcttctctctctctctctcttttttgggggctcatttttgctgttttgattcccgggcttaccaggtgagaagtgagggaggaagaaggcagtgtcccttttgctagagctgacagctttgttcgcgtgggcagagccttccacagtgaatgtgtctggacctcatgttgttgaggctgtcacagtcctgagtgtggacttggcaggtgcctgttgaatctgagctgcaggttccttatctgtcacacctgtgcctcctcagaggacagtttttttgttgttgtgtttttttgtttttttttttttggtagatgcatgacttgtgtgtgatgagagaatggagacagagtccctggctcctctactgtttaacaacatggctttcttattttgtttgaattgttaattcacagaatagcacaaactacaattaaaactaagcacaaagccattctaagtcattggggaaacggggtgaacttcaggtggatgaggagacagaatagagtgataggaagcgtctggcagatactccttttgccactgctgtgtgattagacaggcccagtgagccgcggggcacatgctggccgctcctccctcagaaaaaggcagtggcctaaatcctttttaaatgacttggctcgatgctgtgggggactggctgggctgctgcaggccgtgtgtctgtcagcccaaccttcacatctgtcacgttctccacacgggggagagacgcagtccgcccaggtccccgctttctttggaggcagcagctcccgcagggctgaagtctggcgtaagatgatggatttgattcgccctcctccctgtcatagagctgcagggtggattgttacagcttcgctggaaacctctggaggtcatctcggctgttcctgagaaataaaaagcctgtcatttcaaacactgctgtggaccctactgggtttttaaaatattgtcagtttttcatcgtcgtccctagcctgccaacagccatctgcccagacagccgcagtgaggatgagcgtcctggcagagacgcagttgtctctgggcgcttgccagagccacgaaccccagacctgtttgtatcatccgggctccttccgggcagaaacaactgaaaatgcacttcagacccacttatttctgccacatctgagtcggcctgagatagacttttccctctaaactgggagaatatcacagtggtttttgttagcagaaaatgcactccagcctctgtactcatctaagctgcttatttttgatatttgtgtcagtctgtaaatggatacttcactttaataactgttgcttagtaattggctttgtagagaagctggaaaaaaatggttttgtcttcaactcctttgcatgccaggcggtgatgtggatctcggcttctgtgagcctgtgctgtgggcagggctgagctggagccgcccctctcagcccgcctgccacggcctttccttaaaggccatccttaaaaccagaccctcatggctaccagcacctgaaagcttcctcgacatctgttaataaagccgtaggcccttgtctaagtgcaaccgcctagactttctttcagatacatgtccacatgtccatttttcaggttctctaagttggagtggagtctgggaagggttgtgaatgaggcttctgggctatgggtgaggttccaatggcaggttagagcccctcgggccaactgccatcctggaaagtagagacagcagtgcccgctgcccagaagagaccagcaagccaaactggagcccccattgcaggctgtcgccatgtggaaagagtaactcacaattgccaataaagtctcatgtggttttatctaaaaaaaaaaaaaaaaaaaaaaaaa

SEQ ID NO: 1160 - DNA, 2655 bp, Homo sapiens
cccagaaggccgcggggggtggaccgcctaagagggcgtgcgctcccgacatgccccgcggcgcgccattaaccgccagatttgaatcgcgggacccgttggcagaggtggcggcggcggcatgggtgccccgacgttgccccctgcctggcagccctttctcaaggaccaccgcatctctacattcaagaactggcccttcttggagggctgcgcctgcaccccggagcggatggccgaggctggcttcatccactgccccactgagaacgagccagacttggcccagtgtttcttctgcttcaaggagctggaaggctgggagccagatgacgaccccatagaggaacataaaaagcattcgtccggttgcgctttcctttctgtcaagaagcagtttgaagaattaacccttggtgaatttttgaaactggacagagaaagagccaagaacaaaattgcaaaggaaaccaacaataagaagaaagaatttgaggaaactgcggagaaagtgcgccgtgccatcgagcagctggctgccatggattgaggcctctggccggagctgcctggtcccagagtggctgcaccacttccagggtttattccctggtgccaccagccttcctgtgggccccttagcaatgtcttaggaaaggagatcaacattttcaaattagatgtttcaactgtgctcttgttttgtcttgaaagtggcaccagaggtgcttctgcctgtgcagcgggtgctgctggtaacagtggctgcttctctctctctctctcttttttgggggctcatttttgctgttttgattcccgggcttaccaggtgagaagtgagggaggaagaaggcagtgtcccttttgctagagctgacagctttgttcgcgtgggcagagccttccacagtgaatgtgtctggacctcatgttgttgaggctgtcacagtcctgagtgtggacttggcaggtgcctgttgaatctgagctgcaggttccttatctgtcacacctgtgcctcctcagaggacagtttttttgttgttgtgtttttttgtttttttttttttggtagatgcatgacttgtgtgtgatgagagaatggagacagagtccctggctcctctactgtttaacaacatggctttcttattttgtttgaattgttaattcacagaatagcacaaactacaattaaaactaagcacaaagccattctaagtcattggggaaacggggtgaacttcaggtggatgaggagacagaatagagtgataggaagcgtctggcagatactccttttgccactgctgtgtgattagacaggcccagtgagccgcggggcacatgctggccgctcctccctcagaaaaaggcagtggcctaaatcctttttaaatgacttggctcgatgctgtgggggactggctgggctgctgcaggccgtgtgtctgtcagcccaaccttcacatctgtcacgttctccacacgggggagagacgcagtccgcccaggtccccgctttctttggaggcagcagctcccgcagggctgaagtctggcgtaagatgatggatttgattcgccctcctccctgtcatagagctgcagggtggattgttacagcttcgctggaaacctctggaggtcatctcggctgttcctgagaaataaaaagcctgtcatttcaaacactgctgtggaccctactgggtttttaaaatattgtcagtttttcatcgtcgtccctagcctgccaacagccatctgcccagacagccgcagtgaggatgagcgtcctggcagagacgcagttgtctctgggcgcttgccagagccacgaaccccagacctgtttgtatcatccgggctccttccgggcagaaacaactgaaaatgcacttcagacccacttatttctgccacatctgagtcggcctgagatagacttttccctctaaactgggagaatatcacagtggtttttgttagcagaaaatgcactccagcctctgtactcatctaagctgcttatttttgatatttgtgtcagtctgtaaatggatacttcactttaataactgttgcttagtaattggctttgtagagaagctggaaaaaaatggttttgtcttcaactcctttgcatgccaggcggtgatgtggatctcggcttctgtgagcctgtgctgtgggcagggctgagctggagccgcccctctcagcccgcctgccacggcctttccttaaaggccatccttaaaaccagaccctcatggctaccagcacctgaaagcttcctcgacatctgttaataaagccgtaggcccttgtctaagtgcaaccgcctagactttctttcagatacatgtccacatgtccatttttcaggttctctaagttggagtggagtctgggaagggttgtgaatgaggcttctgggctatgggtgaggttccaatggcaggttagagcccctcgggccaactgccatcctggaaagtagagacagcagtgcccgctgcccagaagagaccagcaagccaaactggagcccccattgcaggctgtcgccatgtggaaagagtaactcacaattgccaataaagtctcatgtggttttatctaaaaaaaaaaaaaaaaaaaaaaaaa

SEQ ID NO: 1161 - RNA, 19 nt, Artificial Sequence
  source: /note="Description of Artificial Sequence: Synthetic oligonucleotide"
cccagaaggccgcgggggg

SEQ ID NO: 1162 - RNA, 19 nt, Artificial Sequence
  source: /note="Description of Artificial Sequence: Synthetic oligonucleotide"
guggaccgccuaagagggc

SEQ ID NO: 1163 - RNA, 19 nt, Artificial Sequence
  source: /note="Description of Artificial Sequence: Synthetic oligonucleotide"
cgugcgcucccgacaugcc

SEQ ID NO: 1164 - RNA, 19 nt, Artificial Sequence
  source: /note="Description of Artificial Sequence: Synthetic oligonucleotide"
cccgcggcgcgccauuaac

SEQ ID NO: 1165 - RNA, 19 nt, Artificial Sequence
  source: /note="Description of Artificial Sequence: Synthetic oligonucleotide"
ccgccagauuugaaucgcg

SEQ ID NO: 1166 - RNA, 19 nt, Artificial Sequence
  source: /note="Description of Artificial Sequence: Synthetic oligonucleotide"
gggacccguuggcagaggu

SEQ ID NO: 1167 - RNA, 19 nt, Artificial Sequence
  source: /note="Description of Artificial Sequence: Synthetic oligonucleotide"
uggcggcggcggcaugggu

SEQ ID NO: 1168 - RNA, 19 nt, Artificial Sequence
  source: /note="Description of Artificial Sequence: Synthetic oligonucleotide"
ugccccgacguugcccccu

SEQ ID NO: 1169 - RNA, 19 nt, Artificial Sequence
  source: /note="Description of Artificial Sequence: Synthetic oligonucleotide"
ugccuggcagcccuuucuc

SEQ ID NO: 1170 - RNA, 19 nt, Artificial Sequence
  source: /note="Description of Artificial Sequence: Synthetic oligonucleotide"
caaggaccaccgcaucucu

SEQ ID NO: 1171 - RNA, 19 nt, Artificial Sequence
  source: /note="Description of Artificial Sequence: Synthetic oligonucleotide"
uacauucaagaacuggccc

SEQ ID NO: 1172 - RNA, 19 nt, Artificial Sequence
  source: /note="Description of Artificial Sequence: Synthetic oligonucleotide"
cuucuuggagggcugcgcc

SEQ ID NO: 1173 - RNA, 19 nt, Artificial Sequence
  source: /note="Description of Artificial Sequence: Synthetic oligonucleotide"
cugcaccccggagcggaug

SEQ ID NO: 1174 - RNA, 19 nt, Artificial Sequence
  source: /note="Description of Artificial Sequence: Synthetic oligonucleotide"
ggccgaggcuggcuucauc

SEQ ID NO: 1175 - RNA, 19 nt, Artificial Sequence
  source: /note="Description of Artificial Sequence: Synthetic oligonucleotide"
ccacugccccacugagaac

SEQ ID NO: 1176 - RNA, 19 nt, Artificial Sequence
  source: /note="Description of Artificial Sequence: Synthetic oligonucleotide"
cgagccagacuuggcccag

SEQ ID NO: 1177 - RNA, 19 nt, Artificial Sequence
  source: /note="Description of Artificial Sequence: Synthetic oligonucleotide"
guguuucuucugcuucaag

SEQ ID NO: 1178 - RNA, 19 nt, Artificial Sequence
  source: /note="Description of Artificial Sequence: Synthetic oligonucleotide"
ggagcuggaaggcugggag

SEQ ID NO: 1179 - RNA, 19 nt, Artificial Sequence
  source: /note="Description of Artificial Sequence: Synthetic oligonucleotide"
gccagaugacgaccccaug

SEQ ID NO: 1180 - RNA, 19 nt, Artificial Sequence
  source: /note="Description of Artificial Sequence: Synthetic oligonucleotide"
gcaaaggaaaccaacaaua

SEQ ID NO: 1181 - RNA, 19 nt, Artificial Sequence
  source: /note="Description of Artificial Sequence: Synthetic oligonucleotide"
aagaagaaagaauuugagg

SEQ ID NO: 1182 - RNA, 19 nt, Artificial Sequence
  source: /note="Description of Artificial Sequence: Synthetic oligonucleotide"
gaaacugcggagaaagugc

SEQ ID NO: 1183 - RNA, 19 nt, Artificial Sequence
  source: /note="Description of Artificial Sequence: Synthetic oligonucleotide"
cgccgugccaucgagcagc

SEQ ID NO: 1184 - RNA, 19 nt, Artificial Sequence
  source: /note="Description of Artificial Sequence: Synthetic oligonucleotide"
cuggcugccauggauugag

SEQ ID NO: 1185 - RNA, 19 nt, Artificial Sequence
  source: /note="Description of Artificial Sequence: Synthetic oligonucleotide"
ggccucuggccggagcugc

SEQ ID NO: 1186 - RNA, 19 nt, Artificial Sequence
  source: /note="Description of Artificial Sequence: Synthetic oligonucleotide"
ccuggucccagaguggcug

SEQ ID NO: 1187 - RNA, 19 nt, Artificial Sequence
  source: /note="Description of Artificial Sequence: Synthetic oligonucleotide"
gcaccacuuccaggguuua

SEQ ID NO: 1188 - RNA, 19 nt, Artificial Sequence
  source: /note="Description of Artificial Sequence: Synthetic oligonucleotide"
auucccuggugccaccagc

SEQ ID NO: 1189 - RNA, 19 nt, Artificial Sequence
  source: /note="Description of Artificial Sequence: Synthetic oligonucleotide"
ccuuccugugggccccuua

SEQ ID NO: 1190 - RNA, 19 nt, Artificial Sequence
  source: /note="Description of Artificial Sequence: Synthetic oligonucleotide"
agcaaugucuuaggaaagg

SEQ ID NO: 1191 - RNA, 19 nt, Artificial Sequence
  source: /note="Description of Artificial Sequence: Synthetic oligonucleotide"
gagaucaacauuuucaaau

SEQ ID NO: 1192 - RNA, 19 nt, Artificial Sequence
  source: /note="Description of Artificial Sequence: Synthetic oligonucleotide"
uuagauguuucaacugugc

SEQ ID NO: 1193 - RNA, 19 nt, Artificial Sequence
  source: /note="Description of Artificial Sequence: Synthetic oligonucleotide"
cucuuguuuugucuugaaa

SEQ ID NO: 1194 - RNA, 19 nt, Artificial Sequence
  source: /note="Description of Artificial Sequence: Synthetic oligonucleotide"
aguggcaccagaggugcuu

SEQ ID NO: 1195 - RNA, 19 nt, Artificial Sequence
  source: /note="Description of Artificial Sequence: Synthetic oligonucleotide"
ucugccugugcagcgggug

SEQ ID NO: 1196 - RNA, 19 nt, Artificial Sequence
  source: /note="Description of Artificial Sequence: Synthetic oligonucleotide"
gcugcugguaacaguggcu

SEQ ID NO: 1197 - RNA, 19 nt, Artificial Sequence
  source: /note="Description of Artificial Sequence: Synthetic oligonucleotide"
ugcuucucucucucucucu

SEQ ID NO: 1198 - RNA, 19 nt, Artificial Sequence
  source: /note="Description of Artificial Sequence: Synthetic oligonucleotide"
ucuuuuuugggggcucauu

SEQ ID NO: 1199 - RNA, 19 nt, Artificial Sequence
  source: /note="Description of Artificial Sequence: Synthetic oligonucleotide"
uuuugcuguuuugauuccc

SEQ ID NO: 1200 - RNA, 19 nt, Artificial Sequence
  source: /note="Description of Artificial Sequence: Synthetic oligonucleotide"
cgggcuuaccaggugagaa

SEQ ID NO: 1201 - RNA, 19 nt, Artificial Sequence
  source: /note="Description of Artificial Sequence: Synthetic oligonucleotide"
agugagggaggaagaaggc

SEQ ID NO: 1202 - RNA, 19 nt, Artificial Sequence
  source: /note="Description of Artificial Sequence: Synthetic oligonucleotide"
cagugucccuuuugcuaga

SEQ ID NO: 1203 - RNA, 19 nt, Artificial Sequence
  source: /note="Description of Artificial Sequence: Synthetic oligonucleotide"
agcugacagcuuuguucgc

SEQ ID NO: 1204 - RNA, 19 nt, Artificial Sequence
  source: /note="Description of Artificial Sequence: Synthetic oligonucleotide"
cgugggcagagccuuccac

SEQ ID NO: 1205 - RNA, 19 nt, Artificial Sequence
  source: /note="Description of Artificial Sequence: Synthetic oligonucleotide"
cagugaaugugucuggacc

SEQ ID NO: 1206 - RNA, 19 nt, Artificial Sequence
  source: /note="Description of Artificial Sequence: Synthetic oligonucleotide"
cucauguuguugaggcugu

SEQ ID NO: 1207 - RNA, 19 nt, Artificial Sequence
  source: /note="Description of Artificial Sequence: Synthetic oligonucleotide"
ucacaguccugagugugga

SEQ ID NO: 1208 - RNA, 19 nt, Artificial Sequence
  source: /note="Description of Artificial Sequence: Synthetic oligonucleotide"
acuuggcaggugccuguug

SEQ ID NO: 1209 - RNA, 19 nt, Artificial Sequence
  source: /note="Description of Artificial Sequence: Synthetic oligonucleotide"
gaaucugagcugcagguuc

SEQ ID NO: 1210 - RNA, 19 nt, Artificial Sequence
  source: /note="Description of Artificial Sequence: Synthetic oligonucleotide"
ccuuaucugucacaccugu

SEQ ID NO: 1211 - RNA, 19 nt, Artificial Sequence
  source: /note="Description of Artificial Sequence: Synthetic oligonucleotide"
ugccuccucagaggacagu

SEQ ID NO: 1212 - RNA, 19 nt, Artificial Sequence
  source: /note="Description of Artificial Sequence: Synthetic oligonucleotide"
uuuuuuuguuguuguguuu

SEQ ID NO: 1213 - RNA, 19 nt, Artificial Sequence
  source: /note="Description of Artificial Sequence: Synthetic oligonucleotide"
ugguagaugcaugacuugu

SEQ ID NO: 1214 - RNA, 19 nt, Artificial Sequence
  source: /note="Description of Artificial Sequence: Synthetic oligonucleotide"
ugugugaugagagaaugga

SEQ ID NO: 1215 - RNA, 19 nt, Artificial Sequence
  source: /note="Description of Artificial Sequence: Synthetic oligonucleotide"
agacagagucccuggcucc

SEQ ID NO: 1216 - RNA, 19 nt, Artificial Sequence
  source: /note="Description of Artificial Sequence: Synthetic oligonucleotide"
cucuacuguuuaacaacau

SEQ ID NO: 1217 - RNA, 19 nt, Artificial Sequence
  source: /note="Description of Artificial Sequence: Synthetic oligonucleotide"
uggcuuucuuauuuuguuu

SEQ ID NO: 1218 - RNA, 19 nt, Artificial Sequence
  source: /note="Description of Artificial Sequence: Synthetic oligonucleotide"
ugaauuguuaauucacaga

SEQ ID NO: 1219 - RNA, 19 nt, Artificial Sequence
  source: /note="Description of Artificial Sequence: Synthetic oligonucleotide"
aauagcacaaacuacaauu

SEQ ID NO: 1220 - RNA, 19 nt, Artificial Sequence
  source: /note="Description of Artificial Sequence: Synthetic oligonucleotide"
uaaaacuaagcacaaagcc

SEQ ID NO: 1221 - RNA, 19 nt, Artificial Sequence
  source: /note="Description of Artificial Sequence: Synthetic oligonucleotide"
cauucuaagucauugggga

SEQ ID NO: 1222 - RNA, 19 nt, Artificial Sequence
  source: /note="Description of Artificial Sequence: Synthetic oligonucleotide"
aaacggggugaacuucagg

SEQ ID NO: 1223 - RNA, 19 nt, Artificial Sequence
  source: /note="Description of Artificial Sequence: Synthetic oligonucleotide"
guggaugaggagacagaau

SEQ ID NO: 1224 - RNA, 19 nt, Artificial Sequence
  source: /note="Description of Artificial Sequence: Synthetic oligonucleotide"
uagagugauaggaagcguc

SEQ ID NO: 1225 - RNA, 19 nt, Artificial Sequence
  source: /note="Description of Artificial Sequence: Synthetic oligonucleotide"
cuggcagauacuccuuuug

SEQ ID NO: 1226 - RNA, 19 nt, Artificial Sequence
  source: /note="Description of Artificial Sequence: Synthetic oligonucleotide"
gccacugcugugugauuag

SEQ ID NO: 1227 - RNA, 19 nt, Artificial Sequence
  source: /note="Description of Artificial Sequence: Synthetic oligonucleotide"
gacaggcccagugagccgc

SEQ ID NO: 1228 - RNA, 19 nt, Artificial Sequence
  source: /note="Description of Artificial Sequence: Synthetic oligonucleotide"
cggggcacaugcuggccgc

SEQ ID NO: 1229 - RNA, 19 nt, Artificial Sequence
  source: /note="Description of Artificial Sequence: Synthetic oligonucleotide"
cuccucccucagaaaaagg

SEQ ID NO: 1230 - RNA, 19 nt, Artificial Sequence
  source: /note="Description of Artificial Sequence: Synthetic oligonucleotide"
gcaguggccuaaauccuuu

SEQ ID NO: 1231 - RNA, 19 nt, Artificial Sequence
  source: /note="Description of Artificial Sequence: Synthetic oligonucleotide"
uuuaaaugacuuggcucga

SEQ ID NO: 1232 - RNA, 19 nt, Artificial Sequence
  source: /note="Description of Artificial Sequence: Synthetic oligonucleotide"
augcugugggggacuggcu

SEQ ID NO: 1233 - RNA, 19 nt, Artificial Sequence
  source: /note="Description of Artificial Sequence: Synthetic oligonucleotide"
ugggcugcugcaggccgug

SEQ ID NO: 1234 - RNA, 19 nt, Artificial Sequence
  source: /note="Description of Artificial Sequence: Synthetic oligonucleotide"
gugucugucagcccaaccu

SEQ ID NO: 1235 - RNA, 19 nt, Artificial Sequence
  source: /note="Description of Artificial Sequence: Synthetic oligonucleotide"
uucacaucugucacguucu

SEQ ID NO: 1236 - RNA, 19 nt, Artificial Sequence
  source: /note="Description of Artificial Sequence: Synthetic oligonucleotide"
uccacacgggggagagacg

SEQ ID NO: 1237 - RNA, 19 nt, Artificial Sequence
  source: /note="Description of Artificial Sequence: Synthetic oligonucleotide"
gcaguccgcccaggucccc

SEQ ID NO: 1238 - RNA, 19 nt, Artificial Sequence
  source: /note="Description of Artificial Sequence: Synthetic oligonucleotide"
cgcuuucuuuggaggcagc

SEQ ID NO: 1239 - RNA, 19 nt, Artificial Sequence
  source: /note="Description of Artificial Sequence: Synthetic oligonucleotide"
cagcucccgcagggcugaa

SEQ ID NO: 1240 - RNA, 19 nt, Artificial Sequence
  source: /note="Description of Artificial Sequence: Synthetic oligonucleotide"
agucuggcguaagaugaug

SEQ ID NO: 1241 - RNA, 19 nt, Artificial Sequence
  source: /note="Description of Artificial Sequence: Synthetic oligonucleotide"
ggauuugauucgcccuccu

SEQ ID NO: 1242 - RNA, 19 nt, Artificial Sequence
  source: /note="Description of Artificial Sequence: Synthetic oligonucleotide"
ucccugucauagagcugca

SEQ ID NO: 1243 - RNA, 19 nt, Artificial Sequence
  source: /note="Description of Artificial Sequence: Synthetic oligonucleotide"
aggguggauuguuacagcu

SEQ ID NO: 1244 - RNA, 19 nt, Artificial Sequence
  source: /note="Description of Artificial Sequence: Synthetic oligonucleotide"
uucgcuggaaaccucugga

SEQ ID NO: 1245 - RNA, 19 nt, Artificial Sequence
  source: /note="Description of Artificial Sequence: Synthetic oligonucleotide"
aggucaucucggcuguucc

SEQ ID NO: 1246 - RNA, 19 nt, Artificial Sequence
  source: /note="Description of Artificial Sequence: Synthetic oligonucleotide"
cugagaaauaaaaagccug

SEQ ID NO: 1247 - RNA, 19 nt, Artificial Sequence
  source: /note="Description of Artificial Sequence: Synthetic oligonucleotide"
gucauuucaaacacugcug

SEQ ID NO: 1248 - RNA, 19 nt, Artificial Sequence
  source: /note="Description of Artificial Sequence: Synthetic oligonucleotide"
guggacccuacuggguuuu

SEQ ID NO: 1249 - RNA, 19 nt, Artificial Sequence
  source: /note="Description of Artificial Sequence: Synthetic oligonucleotide"
uuaaaauauugucaguuuu

SEQ ID NO: 1250 - RNA, 19 nt, Artificial Sequence
  source: /note="Description of Artificial Sequence: Synthetic oligonucleotide"
uucaucgucgucccuagcc

SEQ ID NO: 1251 - RNA, 19 nt, Artificial Sequence
  source: /note="Description of Artificial Sequence: Synthetic oligonucleotide"
cugccaacagccaucugcc

SEQ ID NO: 1252 - RNA, 19 nt, Artificial Sequence
  source: /note="Description of Artificial Sequence: Synthetic oligonucleotide"
ccagacagccgcagugagg

SEQ ID NO: 1253 - RNA, 19 nt, Artificial Sequence
  source: /note="Description of Artificial Sequence: Synthetic oligonucleotide"
gaugagcguccuggcagag

SEQ ID NO: 1254 - RNA, 19 nt, Artificial Sequence
  source: /note="Description of Artificial Sequence: Synthetic oligonucleotide"
gacgcaguugucucugggc

SEQ ID NO: 1255 - RNA, 19 nt, Artificial Sequence
  source: /note="Description of Artificial Sequence: Synthetic oligonucleotide"
cgcuugccagagccacgaa

SEQ ID NO: 1256 - RNA, 19 nt, Artificial Sequence
  source: /note="Description of Artificial Sequence: Synthetic oligonucleotide"
accccagaccuguuuguau

SEQ ID NO: 1257 - RNA, 19 nt, Artificial Sequence
  source: /note="Description of Artificial Sequence: Synthetic oligonucleotide"
ucauccgggcuccuuccgg

SEQ ID NO: 1258 - RNA, 19 nt, Artificial Sequence
  source: /note="Description of Artificial Sequence: Synthetic oligonucleotide"
ggcagaaacaacugaaaau

SEQ ID NO: 1259 - RNA, 19 nt, Artificial Sequence
  source: /note="Description of Artificial Sequence: Synthetic oligonucleotide"
ugcacuucagacccacuua

SEQ ID NO: 1260 - RNA, 19 nt, Artificial Sequence
  source: /note="Description of Artificial Sequence: Synthetic oligonucleotide"
auuucugccacaucugagu

SEQ ID NO: 1261 - RNA, 19 nt, Artificial Sequence
  source: /note="Description of Artificial Sequence: Synthetic oligonucleotide"
ucggccugagauagacuuu

SEQ ID NO: 1262 - RNA, 19 nt, Artificial Sequence
  source: /note="Description of Artificial Sequence: Synthetic oligonucleotide"
uucccucuaaacugggaga

SEQ ID NO: 1263 - RNA, 19 nt, Artificial Sequence
  source: /note="Description of Artificial Sequence: Synthetic oligonucleotide"
aauaucacagugguuuuug

SEQ ID NO: 1264 - RNA, 19 nt, Artificial Sequence
  source: /note="Description of Artificial Sequence: Synthetic oligonucleotide"
guuagcagaaaaugcacuc

SEQ ID NO: 1265 - RNA, 19 nt, Artificial Sequence
  source: /note="Description of Artificial Sequence: Synthetic oligonucleotide"
ccagccucuguacucaucu

SEQ ID NO: 1266 - RNA, 19 nt, Artificial Sequence
  source: /note="Description of Artificial Sequence: Synthetic oligonucleotide"
uaagcugcuuauuuuugau

SEQ ID NO: 1267 - RNA, 19 nt, Artificial Sequence
  source: /note="Description of Artificial Sequence: Synthetic oligonucleotide"
uauuugugucagucuguaa

SEQ ID NO: 1268 - RNA, 19 nt, Artificial Sequence
  source: /note="Description of Artificial Sequence: Synthetic oligonucleotide"
aauggauacuucacuuuaa

SEQ ID NO: 1269 - RNA, 19 nt, Artificial Sequence
  source: /note="Description of Artificial Sequence: Synthetic oligonucleotide"
auaacuguugcuuaguaau

SEQ ID NO: 1270 - RNA, 19 nt, Artificial Sequence
  source: /note="Description of Artificial Sequence: Synthetic oligonucleotide"
uuggcuuuguagagaagcu

SEQ ID NO: 1271 - RNA, 19 nt, Artificial Sequence
  source: /note="Description of Artificial Sequence: Synthetic oligonucleotide"
uggaaaaaaaugguuuugu

SEQ ID NO: 1272 - RNA, 19 nt, Artificial Sequence
  source: /note="Description of Artificial Sequence: Synthetic oligonucleotide"
ucuucaacuccuuugcaug

SEQ ID NO: 1273 - RNA, 19 nt, Artificial Sequence
  source: /note="Description of Artificial Sequence: Synthetic oligonucleotide"
gccaggcggugauguggau

SEQ ID NO: 1274 - RNA, 19 nt, Artificial Sequence
  source: /note="Description of Artificial Sequence: Synthetic oligonucleotide"
ucucggcuucugugagccu

SEQ ID NO: 1275 - RNA, 19 nt, Artificial Sequence
  source: /note="Description of Artificial Sequence: Synthetic oligonucleotide"
ugugcugugggcagggcug

SEQ ID NO: 1276 - RNA, 19 nt, Artificial Sequence
  source: /note="Description of Artificial Sequence: Synthetic oligonucleotide"
gagcuggagccgccccucu

SEQ ID NO: 1277 - RNA, 19 nt, Artificial Sequence
  source: /note="Description of Artificial Sequence: Synthetic oligonucleotide"
ucagcccgccugccacggc

SEQ ID NO: 1278 - RNA, 19 nt, Artificial Sequence
  source: /note="Description of Artificial Sequence: Synthetic oligonucleotide"
ccuuuccuuaaaggccauc

SEQ ID NO: 1279 - RNA, 19 nt, Artificial Sequence
  source: /note="Description of Artificial Sequence: Synthetic oligonucleotide"
ccuuaaaaccagacccuca

SEQ ID NO: 1280 - RNA, 19 nt, Artificial Sequence
  source: /note="Description of Artificial Sequence: Synthetic oligonucleotide"
auggcuaccagcaccugaa

SEQ ID NO: 1281 - RNA, 19 nt, Artificial Sequence
  source: /note="Description of Artificial Sequence: Synthetic oligonucleotide"
aagcuuccucgacaucugu

SEQ ID NO: 1282 - RNA, 19 nt, Artificial Sequence
  source: /note="Description of Artificial Sequence: Synthetic oligonucleotide"
uuaauaaagccguaggccc

SEQ ID NO: 1283 - RNA, 19 nt, Artificial Sequence
  source: /note="Description of Artificial Sequence: Synthetic oligonucleotide"
cuugucuaagugcaaccgc

SEQ ID NO: 1284 - RNA, 19 nt, Artificial Sequence
  source: /note="Description of Artificial Sequence: Synthetic oligonucleotide"
ccuagacuuucuuucagau

SEQ ID NO: 1285 - RNA, 19 nt, Artificial Sequence
  source: /note="Description of Artificial Sequence: Synthetic oligonucleotide"
uacauguccacauguccau

SEQ ID NO: 1286 - RNA, 19 nt, Artificial Sequence
  source: /note="Description of Artificial Sequence: Synthetic oligonucleotide"
uuuuucagguucucuaagu

SEQ ID NO: 1287 - RNA, 19 nt, Artificial Sequence
  source: /note="Description of Artificial Sequence: Synthetic oligonucleotide"
uuggaguggagucugggaa

SEQ ID NO: 1288 - RNA, 19 nt, Artificial Sequence
  source: /note="Description of Artificial Sequence: Synthetic oligonucleotide"
aggguugugaaugaggcuu

SEQ ID NO: 1289 - RNA, 19 nt, Artificial Sequence
  source: /note="Description of Artificial Sequence: Synthetic oligonucleotide"
ucugggcuaugggugaggu

SEQ ID NO: 1290 - RNA, 19 nt, Artificial Sequence
  source: /note="Description of Artificial Sequence: Synthetic oligonucleotide"
uuccaauggcagguuagag

SEQ ID NO: 1291 - RNA, 19 nt, Artificial Sequence
  source: /note="Description of Artificial Sequence: Synthetic oligonucleotide"
gccccucgggccaacugcc

SEQ ID NO: 1292 - RNA, 19 nt, Artificial Sequence
  source: /note="Description of Artificial Sequence: Synthetic oligonucleotide"
cauccuggaaaguagagac

SEQ ID NO: 1293 - RNA, 19 nt, Artificial Sequence
  source: /note="Description of Artificial Sequence: Synthetic oligonucleotide"
cagcagugcccgcugccca

SEQ ID NO: 1294 - RNA, 19 nt, Artificial Sequence
  source: /note="Description of Artificial Sequence: Synthetic oligonucleotide"
agaagagaccagcaagcca

SEQ ID NO: 1295 - RNA, 19 nt, Artificial Sequence
  source: /note="Description of Artificial Sequence: Synthetic oligonucleotide"
aaacuggagcccccauugc

SEQ ID NO: 1296 - RNA, 19 nt, Artificial Sequence
  source: /note="Description of Artificial Sequence: Synthetic oligonucleotide"
caggcugucgccaugugga

SEQ ID NO: 1297 - RNA, 19 nt, Artificial Sequence
  source: /note="Description of Artificial Sequence: Synthetic oligonucleotide"
aaagaguaacucacaauug

SEQ ID NO: 1298 - RNA, 19 nt, Artificial Sequence
  source: /note="Description of Artificial Sequence: Synthetic oligonucleotide"
gccaauaaagucucaugug

SEQ ID NO: 1299 - RNA, 19 nt, Artificial Sequence
  source: /note="Description of Artificial Sequence: Synthetic oligonucleotide"
gguuuuaucuaaaaaaaaa

SEQ ID NO: 1300 - RNA, 19 nt, Artificial Sequence
  source: /note="Description of Artificial Sequence: Synthetic oligonucleotide"
gccagaugacgaccccauu

SEQ ID NO: 1301 - RNA, 19 nt, Artificial Sequence
  source: /note="Description of Artificial Sequence: Synthetic oligonucleotide"
ugggccgggcacgguggcu

SEQ ID NO: 1302 - RNA, 19 nt, Artificial Sequence
  source: /note="Description of Artificial Sequence: Synthetic oligonucleotide"
uuacgccuguaauaccagc

SEQ ID NO: 1303 - RNA, 19 nt, Artificial Sequence
  source: /note="Description of Artificial Sequence: Synthetic oligonucleotide"
cacuuugggaggccgaggc

SEQ ID NO: 1304 - RNA, 19 nt, Artificial Sequence
  source: /note="Description of Artificial Sequence: Synthetic oligonucleotide"
cgggcggaucacgagagag

SEQ ID NO: 1305 - RNA, 19 nt, Artificial Sequence
  source: /note="Description of Artificial Sequence: Synthetic oligonucleotide"
ggaacauaaaaagcauucg

SEQ ID NO: 1306 - RNA, 19 nt, Artificial Sequence
  source: /note="Description of Artificial Sequence: Synthetic oligonucleotide"
guccgguugcgcuuuccuu

SEQ ID NO: 1307 - RNA, 19 nt, Artificial Sequence
  source: /note="Description of Artificial Sequence: Synthetic oligonucleotide"
uucugucaagaagcaguuu

SEQ ID NO: 1308 - RNA, 19 nt, Artificial Sequence
  source: /note="Description of Artificial Sequence: Synthetic oligonucleotide"
ugaagaauuaacccuuggu

SEQ ID NO: 1309 - RNA, 19 nt, Artificial Sequence
  source: /note="Description of Artificial Sequence: Synthetic oligonucleotide"
ugaauuuuugaaacuggac

SEQ ID NO: 1310 - RNA, 19 nt, Artificial Sequence
  source: /note="Description of Artificial Sequence: Synthetic oligonucleotide"
cagagaaagagccaagaac

SEQ ID NO: 1311 - RNA, 19 nt, Artificial Sequence
  source: /note="Description of Artificial Sequence: Synthetic oligonucleotide"
caaaauugcaaaggaaacc

SEQ ID NO: 1312 - RNA, 19 nt, Artificial Sequence
  source: /note="Description of Artificial Sequence: Synthetic oligonucleotide"
caacaauaagaagaaagaa

SEQ ID NO: 1313 - RNA, 19 nt, Artificial Sequence
  source: /note="Description of Artificial Sequence: Synthetic oligonucleotide"
auuugaggaaacugcggag

SEQ ID NO: 1314 - RNA, 19 nt, Artificial Sequence
  source: /note="Description of Artificial Sequence: Synthetic oligonucleotide"
gaaagugcgccgugccauc

SEQ ID NO: 1315 - RNA, 19 nt, Artificial Sequence
  source: /note="Description of Artificial Sequence: Synthetic oligonucleotide"
cgagcagcuggcugccaug

SEQ ID NO: 1316 - RNA, 19 nt, Artificial Sequence
  source: /note="Description of Artificial Sequence: Synthetic oligonucleotide"
ggauugaggccucuggccg

SEQ ID NO: 1317 - RNA, 19 nt, Artificial Sequence
  source: /note="Description of Artificial Sequence: Synthetic oligonucleotide"
ggagcugccuggucccaga

SEQ ID NO: 1318 - RNA, 19 nt, Artificial Sequence
  source: /note="Description of Artificial Sequence: Synthetic oligonucleotide"
aguggcugcaccacuucca

SEQ ID NO: 1319 - RNA, 19 nt, Artificial Sequence
  source: /note="Description of Artificial Sequence: Synthetic oligonucleotide"
aggguuuauucccuggugc

SEQ ID NO: 1320 - RNA, 19 nt, Artificial Sequence
  source: /note="Description of Artificial Sequence: Synthetic oligonucleotide"
ccaccagccuuccuguggg

SEQ ID NO: 1321 - RNA, 19 nt, Artificial Sequence
  source: /note="Description of Artificial Sequence: Synthetic oligonucleotide"
gccccuuagcaaugucuua

SEQ ID NO: 1322 - RNA, 19 nt, Artificial Sequence
  source: /note="Description of Artificial Sequence: Synthetic oligonucleotide"
aggaaaggagaucaacauu

SEQ ID NO: 1323 - RNA, 19 nt, Artificial Sequence
  source: /note="Description of Artificial Sequence: Synthetic oligonucleotide"
uuucaaauuagauguuuca

SEQ ID NO: 1324 - RNA, 19 nt, Artificial Sequence
  source: /note="Description of Artificial Sequence: Synthetic oligonucleotide"
aacugugcucuuguuuugu

SEQ ID NO: 1325 - RNA, 19 nt, Artificial Sequence
  source: /note="Description of Artificial Sequence: Synthetic oligonucleotide"
ucuugaaaguggcaccaga

SEQ ID NO: 1326 - RNA, 19 nt, Artificial Sequence
  source: /note="Description of Artificial Sequence: Synthetic oligonucleotide"
aggugcuucugccugugca

SEQ ID NO: 1327 - RNA, 19 nt, Artificial Sequence
  source: /note="Description of Artificial Sequence: Synthetic oligonucleotide"
agcgggugcugcugguaac

SEQ ID NO: 1328 - RNA, 19 nt, Artificial Sequence
  source: /note="Description of Artificial Sequence: Synthetic oligonucleotide"
caguggcugcuucucucuc

SEQ ID NO: 1329 - RNA, 19 nt, Artificial Sequence
  source: /note="Description of Artificial Sequence: Synthetic oligonucleotide"
cucucucucuuuuuugggg

SEQ ID NO: 1330 - RNA, 19 nt, Artificial Sequence
  source: /note="Description of Artificial Sequence: Synthetic oligonucleotide"
ggcucauuuuugcuguuuu

SEQ ID NO: 1331 - RNA, 19 nt, Artificial Sequence
  source: /note="Description of Artificial Sequence: Synthetic oligonucleotide"
ugauucccgggcuuaccag

SEQ ID NO: 1332 - RNA, 19 nt, Artificial Sequence
  source: /note="Description of Artificial Sequence: Synthetic oligonucleotide"
ggugagaagugagggagga

SEQ ID NO: 1333 - RNA, 19 nt, Artificial Sequence
  source: /note="Description of Artificial Sequence: Synthetic oligonucleotide"
aagaaggcagugucccuuu

SEQ ID NO: 1334 - RNA, 19 nt, Artificial Sequence
  source: /note="Description of Artificial Sequence: Synthetic oligonucleotide"
uugcuagagcugacagcuu

SEQ ID NO: 1335 - RNA, 19 nt, Artificial Sequence
  source: /note="Description of Artificial Sequence: Synthetic oligonucleotide"
uuguucgcgugggcagagc

SEQ ID NO: 1336 - RNA, 19 nt, Artificial Sequence
  source: /note="Description of Artificial Sequence: Synthetic oligonucleotide"
ccuuccacagugaaugugu

SEQ ID NO: 1337 - RNA, 19 nt, Artificial Sequence
  source: /note="Description of Artificial Sequence: Synthetic oligonucleotide"
ucuggaccucauguuguug

SEQ ID NO: 1338 - RNA, 19 nt, Artificial Sequence
  source: /note="Description of Artificial Sequence: Synthetic oligonucleotide"
gaggcugucacaguccuga

SEQ ID NO: 1339 - RNA, 19 nt, Artificial Sequence
  source: /note="Description of Artificial Sequence: Synthetic oligonucleotide"
aguguggacuuggcaggug

SEQ ID NO: 1340 - RNA, 19 nt, Artificial Sequence
  source: /note="Description of Artificial Sequence: Synthetic oligonucleotide"
gccuguugaaucugagcug

SEQ ID NO: 1341 - RNA, 19 nt, Artificial Sequence
  source: /note="Description of Artificial Sequence: Synthetic oligonucleotide"
gcagguuccuuaucuguca

SEQ ID NO: 1342 - RNA, 19 nt, Artificial Sequence
  source: /note="Description of Artificial Sequence: Synthetic oligonucleotide"
acaccugugccuccucaga

SEQ ID NO: 1343 - RNA, 19 nt, Artificial Sequence
  source: /note="Description of Artificial Sequence: Synthetic oligonucleotide"
aggacaguuuuuuuguugu

SEQ ID NO: 1344 - RNA, 19 nt, Artificial Sequence
  source: /note="Description of Artificial Sequence: Synthetic oligonucleotide"
uuguguuuuuuuguuuuuu

SEQ ID NO: 1345 - RNA, 19 nt, Artificial Sequence
  source: /note="Description of Artificial Sequence: Synthetic oligonucleotide"
uuuuuuuugguagaugcau

SEQ ID NO: 1346 - RNA, 19 nt, Artificial Sequence
  source: /note="Description of Artificial Sequence: Synthetic oligonucleotide"
ugacuugugugugaugaga

SEQ ID NO: 1347 - RNA, 19 nt, Artificial Sequence
  source: /note="Description of Artificial Sequence: Synthetic oligonucleotide"
agaauggagacagaguccc

SEQ ID NO: 1348 - RNA, 19 nt, Artificial Sequence
  source: /note="Description of Artificial Sequence: Synthetic oligonucleotide"
cuggcuccucuacuguuua

SEQ ID NO: 1349 - RNA, 19 nt, Artificial Sequence
  source: /note="Description of Artificial Sequence: Synthetic oligonucleotide"
aacaacauggcuuucuuau

SEQ ID NO: 1350 - RNA, 19 nt, Artificial Sequence
  source: /note="Description of Artificial Sequence: Synthetic oligonucleotide"
uuuuguuugaauuguuaau

SEQ ID NO: 1351 - RNA, 19 nt, Artificial Sequence
  source: /note="Description of Artificial Sequence: Synthetic oligonucleotide"
uucacagaauagcacaaac

SEQ ID NO: 1352 - RNA, 19 nt, Artificial Sequence
  source: /note="Description of Artificial Sequence: Synthetic oligonucleotide"
cuacaauuaaaacuaagca

SEQ ID NO: 1353 - RNA, 19 nt, Artificial Sequence
  source: /note="Description of Artificial Sequence: Synthetic oligonucleotide"
acaaagccauucuaaguca

SEQ ID NO: 1354 - RNA, 19 nt, Artificial Sequence
  source: /note="Description of Artificial Sequence: Synthetic oligonucleotide"
auuggggaaacggggugaa

SEQ ID NO: 1355 - RNA, 19 nt, Artificial Sequence
  source: /note="Description of Artificial Sequence: Synthetic oligonucleotide"
acuucagguggaugaggag

SEQ ID NO: 1356 - RNA, 19 nt, Artificial Sequence
  source: /note="Description of Artificial Sequence: Synthetic oligonucleotide"
gacagaauagagugauagg

SEQ ID NO: 1357 - RNA, 19 nt, Artificial Sequence
  source: /note="Description of Artificial Sequence: Synthetic oligonucleotide"
gaagcgucuggcagauacu

SEQ ID NO: 1358 - RNA, 19 nt, Artificial Sequence
  source: /note="Description of Artificial Sequence: Synthetic oligonucleotide"
uccuuuugccacugcugug

SEQ ID NO: 1359 - RNA, 19 nt, Artificial Sequence
  source: /note="Description of Artificial Sequence: Synthetic oligonucleotide"
gugauuagacaggcccagu

SEQ ID NO: 1360 - RNA, 19 nt, Artificial Sequence
  source: /note="Description of Artificial Sequence: Synthetic oligonucleotide"
ugagccgcggggcacaugc

SEQ ID NO: 1361 - RNA, 19 nt, Artificial Sequence
  source: /note="Description of Artificial Sequence: Synthetic oligonucleotide"
cuggccgcuccucccucag

SEQ ID NO: 1362 - RNA, 19 nt, Artificial Sequence
  source: /note="Description of Artificial Sequence: Synthetic oligonucleotide"
gaaaaaggcaguggccuaa

SEQ ID NO: 1363 - RNA, 19 nt, Artificial Sequence
  source: /note="Description of Artificial Sequence: Synthetic oligonucleotide"
aauccuuuuuaaaugacuu

SEQ ID NO: 1364 - RNA, 19 nt, Artificial Sequence
  source: /note="Description of Artificial Sequence: Synthetic oligonucleotide"
uggcucgaugcuguggggg

SEQ ID NO: 1365 - RNA, 19 nt, Artificial Sequence
  source: /note="Description of Artificial Sequence: Synthetic oligonucleotide"
gacuggcugggcugcugca

SEQ ID NO: 1366 - RNA, 19 nt, Artificial Sequence
  source: /note="Description of Artificial Sequence: Synthetic oligonucleotide"
aggccgugugucugucagc

SEQ ID NO: 1367 - RNA, 19 nt, Artificial Sequence
  source: /note="Description of Artificial Sequence: Synthetic oligonucleotide"
cccaaccuucacaucuguc

SEQ ID NO: 1368 - RNA, 19 nt, Artificial Sequence
  source: /note="Description of Artificial Sequence: Synthetic oligonucleotide"
cacguucuccacacggggg

SEQ ID NO: 1369 - RNA, 19 nt, Artificial Sequence
  source: /note="Description of Artificial Sequence: Synthetic oligonucleotide"
gagagacgcaguccgccca

SEQ ID NO: 1370 - RNA, 19 nt, Artificial Sequence
  source: /note="Description of Artificial Sequence: Synthetic oligonucleotide"
agguccccgcuuucuuugg

SEQ ID NO: 1371 - RNA, 19 nt, Artificial Sequence
  source: /note="Description of Artificial Sequence: Synthetic oligonucleotide"
gaggcagcagcucccgcag

SEQ ID NO: 1372 - RNA, 19 nt, Artificial Sequence
  source: /note="Description of Artificial Sequence: Synthetic oligonucleotide"
gggcugaagucuggcguaa

SEQ ID NO: 1373 - RNA, 19 nt, Artificial Sequence
  source: /note="Description of Artificial Sequence: Synthetic oligonucleotide"
agaugauggauuugauucg

SEQ ID NO: 1374 - RNA, 19 nt, Artificial Sequence
  source: /note="Description of Artificial Sequence: Synthetic oligonucleotide"
gcccuccucccugucauag

SEQ ID NO: 1375 - RNA, 19 nt, Artificial Sequence
  source: /note="Description of Artificial Sequence: Synthetic oligonucleotide"
gagcugcaggguggauugu

SEQ ID NO: 1376 - RNA, 19 nt, Artificial Sequence
  source: /note="Description of Artificial Sequence: Synthetic oligonucleotide"
uuacagcuucgcuggaaac

SEQ ID NO: 1377 - RNA, 19 nt, Artificial Sequence
  source: /note="Description of Artificial Sequence: Synthetic oligonucleotide"
ccucuggaggucaucucgg

SEQ ID NO: 1378 - RNA, 19 nt, Artificial Sequence
  source: /note="Description of Artificial Sequence: Synthetic oligonucleotide"
gcuguuccugagaaauaaa

SEQ ID NO: 1379 - RNA, 19 nt, Artificial Sequence
  source: /note="Description of Artificial Sequence: Synthetic oligonucleotide"
aaagccugucauuucaaac

SEQ ID NO: 1380 - RNA, 19 nt, Artificial Sequence
  source: /note="Description of Artificial Sequence: Synthetic oligonucleotide"
cacugcuguggacccuacu

SEQ ID NO: 1381 - RNA, 19 nt, Artificial Sequence
  source: /note="Description of Artificial Sequence: Synthetic oligonucleotide"
uggguuuuuaaaauauugu

SEQ ID NO: 1382 - RNA, 19 nt, Artificial Sequence
  source: /note="Description of Artificial Sequence: Synthetic oligonucleotide"
ucaguuuuucaucgucguc

SEQ ID NO: 1383 - RNA, 19 nt, Artificial Sequence
  source: /note="Description of Artificial Sequence: Synthetic oligonucleotide"
cccuagccugccaacagcc

SEQ ID NO: 1384 - RNA, 19 nt, Artificial Sequence
  source: /note="Description of Artificial Sequence: Synthetic oligonucleotide"
caucugcccagacagccgc

SEQ ID NO: 1385 - RNA, 19 nt, Artificial Sequence
  source: /note="Description of Artificial Sequence: Synthetic oligonucleotide"
cagugaggaugagcguccu

SEQ ID NO: 1386 - RNA, 19 nt, Artificial Sequence
  source: /note="Description of Artificial Sequence: Synthetic oligonucleotide"
uggcagagacgcaguuguc

SEQ ID NO: 1387 - RNA, 19 nt, Artificial Sequence
  source: /note="Description of Artificial Sequence: Synthetic oligonucleotide"
cucugggcgcuugccagag

SEQ ID NO: 1388 - RNA, 19 nt, Artificial Sequence
  source: /note="Description of Artificial Sequence: Synthetic oligonucleotide"
gccacgaaccccagaccug

SEQ ID NO: 1389 - RNA, 19 nt, Artificial Sequence
  source: /note="Description of Artificial Sequence: Synthetic oligonucleotide"
guuuguaucauccgggcuc

SEQ ID NO: 1390 - RNA, 19 nt, Artificial Sequence
  source: /note="Description of Artificial Sequence: Synthetic oligonucleotide"
ccuuccgggcagaaacaac

SEQ ID NO: 1391 - RNA, 19 nt, Artificial Sequence
  source: /note="Description of Artificial Sequence: Synthetic oligonucleotide"
cugaaaaugcacuucagac

SEQ ID NO: 1392 - RNA, 19 nt, Artificial Sequence
  source: /note="Description of Artificial Sequence: Synthetic oligonucleotide"
cccacuuauuucugccaca

SEQ ID NO: 1393 - RNA, 19 nt, Artificial Sequence
  source: /note="Description of Artificial Sequence: Synthetic oligonucleotide"
aucugagucggccugagau

SEQ ID NO: 1394 - RNA, 19 nt, Artificial Sequence
  source: /note="Description of Artificial Sequence: Synthetic oligonucleotide"
uagacuuuucccucuaaac

SEQ ID NO: 1395 - RNA, 19 nt, Artificial Sequence
  source: /note="Description of Artificial Sequence: Synthetic oligonucleotide"
cugggagaauaucacagug

SEQ ID NO: 1396 - RNA, 19 nt, Artificial Sequence
  source: /note="Description of Artificial Sequence: Synthetic oligonucleotide"
gguuuuuguuagcagaaaa

SEQ ID NO: 1397 - RNA, 19 nt, Artificial Sequence
  source: /note="Description of Artificial Sequence: Synthetic oligonucleotide"
augcacuccagccucugua

SEQ ID NO: 1398 - RNA, 19 nt, Artificial Sequence
  source: /note="Description of Artificial Sequence: Synthetic oligonucleotide"
acucaucuaagcugcuuau

SEQ ID NO: 1399 - RNA, 19 nt, Artificial Sequence
  source: /note="Description of Artificial Sequence: Synthetic oligonucleotide"
uuuuugauauuugugucag

SEQ ID NO: 1400 - RNA, 19 nt, Artificial Sequence
  source: /note="Description of Artificial Sequence: Synthetic oligonucleotide"
gucuguaaauggauacuuc

SEQ ID NO: 1401 - RNA, 19 nt, Artificial Sequence
  source: /note="Description of Artificial Sequence: Synthetic oligonucleotide"
cacuuuaauaacuguugcu

SEQ ID NO: 1402 - RNA, 19 nt, Artificial Sequence
  source: /note="Description of Artificial Sequence: Synthetic oligonucleotide"
uuaguaauuggcuuuguag

SEQ ID NO: 1403 - RNA, 19 nt, Artificial Sequence
  source: /note="Description of Artificial Sequence: Synthetic oligonucleotide"
gagaagcuggaaaaaaaug

SEQ ID NO: 1404 - RNA, 19 nt, Artificial Sequence
  source: /note="Description of Artificial Sequence: Synthetic oligonucleotide"
gguuuugucuucaacuccu

SEQ ID NO: 1405 - RNA, 19 nt, Artificial Sequence
  source: /note="Description of Artificial Sequence: Synthetic oligonucleotide"
uuugcaugccaggcgguga

SEQ ID NO: 1406 - RNA, 19 nt, Artificial Sequence
  source: /note="Description of Artificial Sequence: Synthetic oligonucleotide"
auguggaucucggcuucug

SEQ ID NO: 1407 - RNA, 19 nt, Artificial Sequence
  source: /note="Description of Artificial Sequence: Synthetic oligonucleotide"
gugagccugugcugugggc

SEQ ID NO: 1408 - RNA, 19 nt, Artificial Sequence
  source: /note="Description of Artificial Sequence: Synthetic oligonucleotide"
cagggcugagcuggagccg

SEQ ID NO: 1409 - RNA, 19 nt, Artificial Sequence
  source: /note="Description of Artificial Sequence: Synthetic oligonucleotide"
gccccucucagcccgccug

SEQ ID NO: 1410 - RNA, 19 nt, Artificial Sequence
  source: /note="Description of Artificial Sequence: Synthetic oligonucleotide"
gccacggccuuuccuuaaa

SEQ ID NO: 1411 - RNA, 19 nt, Artificial Sequence
  source: /note="Description of Artificial Sequence: Synthetic oligonucleotide"
aggccauccuuaaaaccag

SEQ ID NO: 1412 - RNA, 19 nt, Artificial Sequence
  source: /note="Description of Artificial Sequence: Synthetic oligonucleotide"
gacccucauggcuaccagc

SEQ ID NO: 1413 - RNA, 19 nt, Artificial Sequence
  source: /note="Description of Artificial Sequence: Synthetic oligonucleotide"
caccugaaagcuuccucga

SEQ ID NO: 1414 - RNA, 19 nt, Artificial Sequence
  source: /note="Description of Artificial Sequence: Synthetic oligonucleotide"
acaucuguuaauaaagccg

SEQ ID NO: 1415 - RNA, 19 nt, Artificial Sequence
  source: /note="Description of Artificial Sequence: Synthetic oligonucleotide"
guaggcccuugucuaagug

SEQ ID NO: 1416 - RNA, 19 nt, Artificial Sequence
  source: /note="Description of Artificial Sequence: Synthetic oligonucleotide"
gcaaccgccuagacuuucu

SEQ ID NO: 1417 - RNA, 19 nt, Artificial Sequence
  source: /note="Description of Artificial Sequence: Synthetic oligonucleotide"
uuucagauacauguccaca

SEQ ID NO: 1418 - RNA, 19 nt, Artificial Sequence
  source: /note="Description of Artificial Sequence: Synthetic oligonucleotide"
auguccauuuuucagguuc

SEQ ID NO: 1419 - RNA, 19 nt, Artificial Sequence
  source: /note="Description of Artificial Sequence: Synthetic oligonucleotide"
cucuaaguuggaguggagu

SEQ ID NO: 1420 - RNA, 19 nt, Artificial Sequence
  source: /note="Description of Artificial Sequence: Synthetic oligonucleotide"
ucugggaaggguugugaau

SEQ ID NO: 1421 - RNA, 19 nt, Artificial Sequence
  source: /note="Description of Artificial Sequence: Synthetic oligonucleotide"
ugaggcuucugggcuaugg

SEQ ID NO: 1422 - RNA, 19 nt, Artificial Sequence
  source: /note="Description of Artificial Sequence: Synthetic oligonucleotide"
ggugagguuccaauggcag

SEQ ID NO: 1423 - RNA, 19 nt, Artificial Sequence
  source: /note="Description of Artificial Sequence: Synthetic oligonucleotide"
gguuagagccccucgggcc

SEQ ID NO: 1424 - RNA, 19 nt, Artificial Sequence
  source: /note="Description of Artificial Sequence: Synthetic oligonucleotide"
caacugccauccuggaaag

SEQ ID NO: 1425 - RNA, 19 nt, Artificial Sequence
  source: /note="Description of Artificial Sequence: Synthetic oligonucleotide"
guagagacagcagugcccg

SEQ ID NO: 1426 - RNA, 19 nt, Artificial Sequence
  source: /note="Description of Artificial Sequence: Synthetic oligonucleotide"
gcugcccagaagagaccag

SEQ ID NO: 1427 - RNA, 19 nt, Artificial Sequence
  source: /note="Description of Artificial Sequence: Synthetic oligonucleotide"
gcaagccaaacuggagccc

SEQ ID NO: 1428 - RNA, 19 nt, Artificial Sequence
  source: /note="Description of Artificial Sequence: Synthetic oligonucleotide"
cccauugcaggcugucgcc

SEQ ID NO: 1429 - RNA, 19 nt, Artificial Sequence
  source: /note="Description of Artificial Sequence: Synthetic oligonucleotide"
cauguggaaagaguaacuc

SEQ ID NO: 1430 - RNA, 19 nt, Artificial Sequence
  source: /note="Description of Artificial Sequence: Synthetic oligonucleotide"
cacaauugccaauaaaguc

SEQ ID NO: 1431 - RNA, 19 nt, Artificial Sequence
  source: /note="Description of Artificial Sequence: Synthetic oligonucleotide"
cucaugugguuuuaucuaa

SEQ ID NO: 1432 - RNA, 19 nt, Artificial Sequence
  source: /note="Description of Artificial Sequence: Synthetic oligonucleotide"
gccagaugacgaccccaua

SEQ ID NO: 1433 - RNA, 19 nt, Artificial Sequence
  source: /note="Description of Artificial Sequence: Synthetic oligonucleotide"
agaggaacauaaaaagcau

SEQ ID NO: 1434 - RNA, 19 nt, Artificial Sequence
  source: /note="Description of Artificial Sequence: Synthetic oligonucleotide"
uucguccgguugcgcuuuc

SEQ ID NO: 1435 - RNA, 19 nt, Artificial Sequence
  source: /note="Description of Artificial Sequence: Synthetic oligonucleotide"
ccuuucugucaagaagcag

SEQ ID NO: 1436 - RNA, 19 nt, Artificial Sequence
  source: /note="Description of Artificial Sequence: Synthetic oligonucleotide"
guuugaagaauuaacccuu

SEQ ID NO: 1437 - RNA, 19 nt, Artificial Sequence
  source: /note="Description of Artificial Sequence: Synthetic oligonucleotide"
uggugaauuuuugaaacug

SEQ ID NO: 1438 - RNA, 19 nt, Artificial Sequence
  source: /note="Description of Artificial Sequence: Synthetic oligonucleotide"
ggacagagaaagagccaag

SEQ ID NO: 1439 - RNA, 19 nt, Artificial Sequence
  source: /note="Description of Artificial Sequence: Synthetic oligonucleotide"
gaacaaaauugcaaaggaa

SEQ ID NO: 1440 - RNA, 19 nt, Artificial Sequence
  source: /note="Description of Artificial Sequence: Synthetic oligonucleotide"
aaccaacaauaagaagaaa

SEQ ID NO: 1441 - RNA, 19 nt, Artificial Sequence
  source: /note="Description of Artificial Sequence: Synthetic oligonucleotide"
agaauuugaggaaacugcg

SEQ ID NO: 1442 - RNA, 19 nt, Artificial Sequence
  source: /note="Description of Artificial Sequence: Synthetic oligonucleotide"
ggagaaagugcgccgugcc

SEQ ID NO: 1443 - RNA, 19 nt, Artificial Sequence
  source: /note="Description of Artificial Sequence: Synthetic oligonucleotide"
caucgagcagcuggcugcc

SEQ ID NO: 1444 - RNA, 19 nt, Artificial Sequence
  source: /note="Description of Artificial Sequence: Synthetic oligonucleotide"
cauggauugaggccucugg

SEQ ID NO: 1445 - RNA, 19 nt, Artificial Sequence
  source: /note="Description of Artificial Sequence: Synthetic oligonucleotide"
gccggagcugccugguccc

SEQ ID NO: 1446 - RNA, 19 nt, Artificial Sequence
  source: /note="Description of Artificial Sequence: Synthetic oligonucleotide"
cagaguggcugcaccacuu

SEQ ID NO: 1447 - RNA, 19 nt, Artificial Sequence
  source: /note="Description of Artificial Sequence: Synthetic oligonucleotide"
uccaggguuuauucccugg

SEQ ID NO: 1448 - RNA, 19 nt, Artificial Sequence
  source: /note="Description of Artificial Sequence: Synthetic oligonucleotide"
gugccaccagccuuccugu

SEQ ID NO: 1449 - RNA, 19 nt, Artificial Sequence
  source: /note="Description of Artificial Sequence: Synthetic oligonucleotide"
ugggccccuuagcaauguc

SEQ ID NO: 1450 - RNA, 19 nt, Artificial Sequence
  source: /note="Description of Artificial Sequence: Synthetic oligonucleotide"
cuuaggaaaggagaucaac

SEQ ID NO: 1451 - RNA, 19 nt, Artificial Sequence
  source: /note="Description of Artificial Sequence: Synthetic oligonucleotide"
cauuuucaaauuagauguu

SEQ ID NO: 1452 - RNA, 19 nt, Artificial Sequence
  source: /note="Description of Artificial Sequence: Synthetic oligonucleotide"
uucaacugugcucuuguuu

SEQ ID NO: 1453 - RNA, 19 nt, Artificial Sequence
  source: /note="Description of Artificial Sequence: Synthetic oligonucleotide"
uugucuugaaaguggcacc

SEQ ID NO: 1454 - RNA, 19 nt, Artificial Sequence
  source: /note="Description of Artificial Sequence: Synthetic oligonucleotide"
cagaggugcuucugccugu

SEQ ID NO: 1455 - RNA, 19 nt, Artificial Sequence
  source: /note="Description of Artificial Sequence: Synthetic oligonucleotide"
ugcagcgggugcugcuggu

SEQ ID NO: 1456 - RNA, 19 nt, Artificial Sequence
  source: /note="Description of Artificial Sequence: Synthetic oligonucleotide"
uaacaguggcugcuucucu

SEQ ID NO: 1457 - RNA, 19 nt, Artificial Sequence
  source: /note="Description of Artificial Sequence: Synthetic oligonucleotide"
ucucucucucucuuuuuug

SEQ ID NO: 1458 - RNA, 19 nt, Artificial Sequence
  source: /note="Description of Artificial Sequence: Synthetic oligonucleotide"
gggggcucauuuuugcugu

SEQ ID NO: 1459 - RNA, 19 nt, Artificial Sequence
  source: /note="Description of Artificial Sequence: Synthetic oligonucleotide"
uuuugauucccgggcuuac

SEQ ID NO: 1460 - RNA, 19 nt, Artificial Sequence
  source: /note="Description of Artificial Sequence: Synthetic oligonucleotide"
ccaggugagaagugaggga

SEQ ID NO: 1461 - RNA, 19 nt, Artificial Sequence
  source: /note="Description of Artificial Sequence: Synthetic oligonucleotide"
aggaagaaggcaguguccc

SEQ ID NO: 1462 - RNA, 19 nt, Artificial Sequence
  source: /note="Description of Artificial Sequence: Synthetic oligonucleotide"
cuuuugcuagagcugacag

SEQ ID NO: 1463 - RNA, 19 nt, Artificial Sequence
  source: /note="Description of Artificial Sequence: Synthetic oligonucleotide"
gcuuuguucgcgugggcag

SEQ ID NO: 1464 - RNA, 19 nt, Artificial Sequence
  source: /note="Description of Artificial Sequence: Synthetic oligonucleotide"
gagccuuccacagugaaug

SEQ ID NO: 1465 - RNA, 19 nt, Artificial Sequence
  source: /note="Description of Artificial Sequence: Synthetic oligonucleotide"
gugucuggaccucauguug

SEQ ID NO: 1466 - RNA, 19 nt, Artificial Sequence
  source: /note="Description of Artificial Sequence: Synthetic oligonucleotide"
guugaggcugucacagucc

SEQ ID NO: 1467 - RNA, 19 nt, Artificial Sequence
  source: /note="Description of Artificial Sequence: Synthetic oligonucleotide"
cugaguguggacuuggcag

SEQ ID NO: 1468 - RNA, 19 nt, Artificial Sequence
  source: /note="Description of Artificial Sequence: Synthetic oligonucleotide"
ggugccuguugaaucugag

SEQ ID NO: 1469 - RNA, 19 nt, Artificial Sequence
  source: /note="Description of Artificial Sequence: Synthetic oligonucleotide"
gcugcagguuccuuaucug

SEQ ID NO: 1470 - RNA, 19 nt, Artificial Sequence
  source: /note="Description of Artificial Sequence: Synthetic oligonucleotide"
gucacaccugugccuccuc

SEQ ID NO: 1471 - RNA, 19 nt, Artificial Sequence
  source: /note="Description of Artificial Sequence: Synthetic oligonucleotide"
cagaggacaguuuuuuugu

SEQ ID NO: 1472 - RNA, 19 nt, Artificial Sequence
  source: /note="Description of Artificial Sequence: Synthetic oligonucleotide"
uuguuguguuuuuuuguuu

SEQ ID NO: 1473 - RNA, 19 nt, Artificial Sequence
  source: /note="Description of Artificial Sequence: Synthetic oligonucleotide"
gcaugacuugugugugaug

SEQ ID NO: 1474 - RNA, 19 nt, Artificial Sequence
  source: /note="Description of Artificial Sequence: Synthetic oligonucleotide"
gagagaauggagacagagu

SEQ ID NO: 1475 - RNA, 19 nt, Artificial Sequence
  source: /note="Description of Artificial Sequence: Synthetic oligonucleotide"
ucccuggcuccucuacugu

SEQ ID NO: 1476 - RNA, 19 nt, Artificial Sequence
  source: /note="Description of Artificial Sequence: Synthetic oligonucleotide"
uuuaacaacauggcuuucu

SEQ ID NO: 1477 - RNA, 19 nt, Artificial Sequence
  source: /note="Description of Artificial Sequence: Synthetic oligonucleotide"
uuauuuuguuugaauuguu

SEQ ID NO: 1478 - RNA, 19 nt, Artificial Sequence
  source: /note="Description of Artificial Sequence: Synthetic oligonucleotide"
uaauucacagaauagcaca

SEQ ID NO: 1479 - RNA, 19 nt, Artificial Sequence
  source: /note="Description of Artificial Sequence: Synthetic oligonucleotide"
aaacuacaauuaaaacuaa

SEQ ID NO: 1480 - RNA, 19 nt, Artificial Sequence
  source: /note="Description of Artificial Sequence: Synthetic oligonucleotide"
agcacaaagccauucuaag

SEQ ID NO: 1481 - RNA, 19 nt, Artificial Sequence
  source: /note="Description of Artificial Sequence: Synthetic oligonucleotide"
gucauuggggaaacggggu

SEQ ID NO: 1482 - RNA, 19 nt, Artificial Sequence
  source: /note="Description of Artificial Sequence: Synthetic oligonucleotide"
ugaacuucagguggaugag

SEQ ID NO: 1483 - RNA, 19 nt, Artificial Sequence
  source: /note="Description of Artificial Sequence: Synthetic oligonucleotide"
ggagacagaauagagugau

SEQ ID NO: 1484 - RNA, 19 nt, Artificial Sequence
  source: /note="Description of Artificial Sequence: Synthetic oligonucleotide"
uaggaagcgucuggcagau

SEQ ID NO: 1485 - RNA, 19 nt, Artificial Sequence
  source: /note="Description of Artificial Sequence: Synthetic oligonucleotide"
uacuccuuuugccacugcu

SEQ ID NO: 1486 - RNA, 19 nt, Artificial Sequence
  source: /note="Description of Artificial Sequence: Synthetic oligonucleotide"
ugugugauuagacaggccc

SEQ ID NO: 1487 - RNA, 19 nt, Artificial Sequence
  source: /note="Description of Artificial Sequence: Synthetic oligonucleotide"
cagugagccgcggggcaca

SEQ ID NO: 1488 - RNA, 19 nt, Artificial Sequence
  source: /note="Description of Artificial Sequence: Synthetic oligonucleotide"
augcuggccgcuccucccu

SEQ ID NO: 1489 - RNA, 19 nt, Artificial Sequence
  source: /note="Description of Artificial Sequence: Synthetic oligonucleotide"
ucagaaaaaggcaguggcc

SEQ ID NO: 1490 - RNA, 19 nt, Artificial Sequence
  source: /note="Description of Artificial Sequence: Synthetic oligonucleotide"
cuaaauccuuuuuaaauga

SEQ ID NO: 1491 - RNA, 19 nt, Artificial Sequence
  source: /note="Description of Artificial Sequence: Synthetic oligonucleotide"
acuuggcucgaugcugugg

SEQ ID NO: 1492 - RNA, 19 nt, Artificial Sequence
  source: /note="Description of Artificial Sequence: Synthetic oligonucleotide"
ggggacuggcugggcugcu

SEQ ID NO: 1493 - RNA, 19 nt, Artificial Sequence
  source: /note="Description of Artificial Sequence: Synthetic oligonucleotide"
ugcaggccgugugucuguc

SEQ ID NO: 1494 - RNA, 19 nt, Artificial Sequence
  source: /note="Description of Artificial Sequence: Synthetic oligonucleotide"
cagcccaaccuucacaucu

SEQ ID NO: 1495 - RNA, 19 nt, Artificial Sequence
  source: /note="Description of Artificial Sequence: Synthetic oligonucleotide"
ugucacguucuccacacgg

SEQ ID NO: 1496 - RNA, 19 nt, Artificial Sequence
  source: /note="Description of Artificial Sequence: Synthetic oligonucleotide"
ggggagagacgcaguccgc

SEQ ID NO: 1497 - RNA, 19 nt, Artificial Sequence
  source: /note="Description of Artificial Sequence: Synthetic oligonucleotide"
cccagguccccgcuuucuu

SEQ ID NO: 1498 - RNA, 19 nt, Artificial Sequence
  source: /note="Description of Artificial Sequence: Synthetic oligonucleotide"
uuggaggcagcagcucccg

SEQ ID NO: 1499 - RNA, 19 nt, Artificial Sequence
  source: /note="Description of Artificial Sequence: Synthetic oligonucleotide"
gcagggcugaagucuggcg

SEQ ID NO: 1500 - RNA, 19 nt, Artificial Sequence
  source: /note="Description of Artificial Sequence: Synthetic oligonucleotide"
guaagaugauggauuugau

SEQ ID NO: 1501 - RNA, 19 nt, Artificial Sequence
  source: /note="Description of Artificial Sequence: Synthetic oligonucleotide"
uucgcccuccucccuguca

SEQ ID NO: 1502 - RNA, 19 nt, Artificial Sequence
  source: /note="Description of Artificial Sequence: Synthetic oligonucleotide"
auagagcugcaggguggau

SEQ ID NO: 1503 - RNA, 19 nt, Artificial Sequence
  source: /note="Description of Artificial Sequence: Synthetic oligonucleotide"
uuguuacagcuucgcugga

SEQ ID NO: 1504 - RNA, 19 nt, Artificial Sequence
  source: /note="Description of Artificial Sequence: Synthetic oligonucleotide"
aaaccucuggaggucaucu

SEQ ID NO: 1505 - RNA, 19 nt, Artificial Sequence
  source: /note="Description of Artificial Sequence: Synthetic oligonucleotide"
ucggcuguuccugagaaau

SEQ ID NO: 1506 - RNA, 19 nt, Artificial Sequence
  source: /note="Description of Artificial Sequence: Synthetic oligonucleotide"
uaaaaagccugucauuuca

SEQ ID NO: 1507 - RNA, 19 nt, Artificial Sequence
  source: /note="Description of Artificial Sequence: Synthetic oligonucleotide"
aaacacugcuguggacccu

SEQ ID NO: 1508 - RNA, 19 nt, Artificial Sequence
  source: /note="Description of Artificial Sequence: Synthetic oligonucleotide"
uacuggguuuuuaaaauau

SEQ ID NO: 1509 - RNA, 19 nt, Artificial Sequence
  source: /note="Description of Artificial Sequence: Synthetic oligonucleotide"
uugucaguuuuucaucguc

SEQ ID NO: 1510 - RNA, 19 nt, Artificial Sequence
  source: /note="Description of Artificial Sequence: Synthetic oligonucleotide"
cgucccuagccugccaaca

SEQ ID NO: 1511 - RNA, 19 nt, Artificial Sequence
  source: /note="Description of Artificial Sequence: Synthetic oligonucleotide"
agccaucugcccagacagc

SEQ ID NO: 1512 - RNA, 19 nt, Artificial Sequence
  source: /note="Description of Artificial Sequence: Synthetic oligonucleotide"
ccgcagugaggaugagcgu

SEQ ID NO: 1513 - RNA, 19 nt, Artificial Sequence
  source: /note="Description of Artificial Sequence: Synthetic oligonucleotide"
uccuggcagagacgcaguu

SEQ ID NO: 1514 - RNA, 19 nt, Artificial Sequence
  source: /note="Description of Artificial Sequence: Synthetic oligonucleotide"
ugucucugggcgcuugcca

SEQ ID NO: 1515 - RNA, 19 nt, Artificial Sequence
  source: /note="Description of Artificial Sequence: Synthetic oligonucleotide"
agagccacgaaccccagac

SEQ ID NO: 1516 - RNA, 19 nt, Artificial Sequence
  source: /note="Description of Artificial Sequence: Synthetic oligonucleotide"
ccuguuuguaucauccggg

SEQ ID NO: 1517 - RNA, 19 nt, Artificial Sequence
  source: /note="Description of Artificial Sequence: Synthetic oligonucleotide"
gcuccuuccgggcagaaac

SEQ ID NO: 1518 - RNA, 19 nt, Artificial Sequence
  source: /note="Description of Artificial Sequence: Synthetic oligonucleotide"
caacugaaaaugcacuuca

SEQ ID NO: 1519 - RNA, 19 nt, Artificial Sequence
  source: /note="Description of Artificial Sequence: Synthetic oligonucleotide"
agacccacuuauuucugcc

SEQ ID NO: 1520 - RNA, 19 nt, Artificial Sequence
  source: /note="Description of Artificial Sequence: Synthetic oligonucleotide"
cacaucugagucggccuga

SEQ ID NO: 1521 - RNA, 19 nt, Artificial Sequence
  source: /note="Description of Artificial Sequence: Synthetic oligonucleotide"
agauagacuuuucccucua

SEQ ID NO: 1522 - RNA, 19 nt, Artificial Sequence
  source: /note="Description of Artificial Sequence: Synthetic oligonucleotide"
aaacugggagaauaucaca

SEQ ID NO: 1523 - RNA, 19 nt, Artificial Sequence
  source: /note="Description of Artificial Sequence: Synthetic oligonucleotide"
agugguuuuuguuagcaga

SEQ ID NO: 1524 - RNA, 19 nt, Artificial Sequence
  source: /note="Description of Artificial Sequence: Synthetic oligonucleotide"
aaaaugcacuccagccucu

SEQ ID NO: 1525 - RNA, 19 nt, Artificial Sequence
  source: /note="Description of Artificial Sequence: Synthetic oligonucleotide"
uguacucaucuaagcugcu

SEQ ID NO: 1526 - RNA, 19 nt, Artificial Sequence
  source: /note="Description of Artificial Sequence: Synthetic oligonucleotide"
uuauuuuugauauuugugu

SEQ ID NO: 1527 - RNA, 19 nt, Artificial Sequence
  source: /note="Description of Artificial Sequence: Synthetic oligonucleotide"
ucagucuguaaauggauac

SEQ ID NO: 1528 - RNA, 19 nt, Artificial Sequence
  source: /note="Description of Artificial Sequence: Synthetic oligonucleotide"
cuucacuuuaauaacuguu

SEQ ID NO: 1529 - RNA, 19 nt, Artificial Sequence
  source: /note="Description of Artificial Sequence: Synthetic oligonucleotide"
ugcuuaguaauuggcuuug

SEQ ID NO: 1530 - RNA, 19 nt, Artificial Sequence
  source: /note="Description of Artificial Sequence: Synthetic oligonucleotide"
guagagaagcuggaaaaaa

SEQ ID NO: 1531 - RNA, 19 nt, Artificial Sequence
  source: /note="Description of Artificial Sequence: Synthetic oligonucleotide"
aaugguuuugucuucaacu

SEQ ID NO: 1532 - RNA, 19 nt, Artificial Sequence
  source: /note="Description of Artificial Sequence: Synthetic oligonucleotide"
uccuuugcaugccaggcgg

SEQ ID NO: 1533 - RNA, 19 nt, Artificial Sequence
  source: /note="Description of Artificial Sequence: Synthetic oligonucleotide"
gugauguggaucucggcuu

SEQ ID NO: 1534 - RNA, 19 nt, Artificial Sequence
  source: /note="Description of Artificial Sequence: Synthetic oligonucleotide"
ucugugagccugugcugug

SEQ ID NO: 1535 - RNA, 19 nt, Artificial Sequence
  source: /note="Description of Artificial Sequence: Synthetic oligonucleotide"
gggcagggcugagcuggag

SEQ ID NO: 1536 - RNA, 19 nt, Artificial Sequence
  source: /note="Description of Artificial Sequence: Synthetic oligonucleotide"
gccgccccucucagcccgc

SEQ ID NO: 1537 - RNA, 19 nt, Artificial Sequence
  source: /note="Description of Artificial Sequence: Synthetic oligonucleotide"
ccugccacggccuuuccuu

SEQ ID NO: 1538 - RNA, 19 nt, Artificial Sequence
  source: /note="Description of Artificial Sequence: Synthetic oligonucleotide"
uaaaggccauccuuaaaac

SEQ ID NO: 1539 - RNA, 19 nt, Artificial Sequence
  source: /note="Description of Artificial Sequence: Synthetic oligonucleotide"
ccagacccucauggcuacc

SEQ ID NO: 1540 - RNA, 19 nt, Artificial Sequence
  source: /note="Description of Artificial Sequence: Synthetic oligonucleotide"
cagcaccugaaagcuuccu

SEQ ID NO: 1541 - RNA, 19 nt, Artificial Sequence
  source: /note="Description of Artificial Sequence: Synthetic oligonucleotide"
ucgacaucuguuaauaaag

SEQ ID NO: 1542 - RNA, 19 nt, Artificial Sequence
  source: /note="Description of Artificial Sequence: Synthetic oligonucleotide"
gccguaggcccuugucuaa

SEQ ID NO: 1543 - RNA, 19 nt, Artificial Sequence
  source: /note="Description of Artificial Sequence: Synthetic oligonucleotide"
agugcaaccgccuagacuu

SEQ ID NO: 1544 - RNA, 19 nt, Artificial Sequence
  source: /note="Description of Artificial Sequence: Synthetic oligonucleotide"
uucuuucagauacaugucc

SEQ ID NO: 1545 - RNA, 19 nt, Artificial Sequence
  source: /note="Description of Artificial Sequence: Synthetic oligonucleotide"
cacauguccauuuuucagg

SEQ ID NO: 1546 - RNA, 19 nt, Artificial Sequence
  source: /note="Description of Artificial Sequence: Synthetic oligonucleotide"
guucucuaaguuggagugg

SEQ ID NO: 1547 - RNA, 19 nt, Artificial Sequence
  source: /note="Description of Artificial Sequence: Synthetic oligonucleotide"
gagucugggaaggguugug

SEQ ID NO: 1548 - RNA, 19 nt, Artificial Sequence
  source: /note="Description of Artificial Sequence: Synthetic oligonucleotide"
gaaugaggcuucugggcua

SEQ ID NO: 1549 - RNA, 19 nt, Artificial Sequence
  source: /note="Description of Artificial Sequence: Synthetic oligonucleotide"
augggugagguuccaaugg

SEQ ID NO: 1550 - RNA, 19 nt, Artificial Sequence
  source: /note="Description of Artificial Sequence: Synthetic oligonucleotide"
gcagguuagagccccucgg

SEQ ID NO: 1551 - RNA, 19 nt, Artificial Sequence
  source: /note="Description of Artificial Sequence: Synthetic oligonucleotide"
ggccaacugccauccugga

SEQ ID NO: 1552 - RNA, 19 nt, Artificial Sequence
  source: /note="Description of Artificial Sequence: Synthetic oligonucleotide"
aaaguagagacagcagugc

SEQ ID NO: 1553 - RNA, 19 nt, Artificial Sequence
  source: /note="Description of Artificial Sequence: Synthetic oligonucleotide"
cccgcugcccagaagagac

SEQ ID NO: 1554 - RNA, 19 nt, Artificial Sequence
  source: /note="Description of Artificial Sequence: Synthetic oligonucleotide"
ccagcaagccaaacuggag

SEQ ID NO: 1555 - RNA, 19 nt, Artificial Sequence
  source: /note="Description of Artificial Sequence: Synthetic oligonucleotide"
gcccccauugcaggcuguc

SEQ ID NO: 1556 - RNA, 19 nt, Artificial Sequence
  source: /note="Description of Artificial Sequence: Synthetic oligonucleotide"
cgccauguggaaagaguaa

SEQ ID NO: 1557 - RNA, 19 nt, Artificial Sequence
  source: /note="Description of Artificial Sequence: Synthetic oligonucleotide"
acucacaauugccaauaaa

SEQ ID NO: 1558 - RNA, 19 nt, Artificial Sequence
  source: /note="Description of Artificial Sequence: Synthetic oligonucleotide"
agucucaugugguuuuauc

SEQ ID NO: 1559 - RNA, 25 nt, Artificial Sequence
  source: /note="Description of Artificial Sequence: Synthetic oligonucleotide"
cccagaaggccgcgggggguggacc

SEQ ID NO: 1560 - RNA, 25 nt, Artificial Sequence
  source: /note="Description of Artificial Sequence: Synthetic oligonucleotide"
cgccuaagagggcgugcgcucccga

SEQ ID NO: 1561 - RNA, 25 nt, Artificial Sequence
  source: /note="Description of Artificial Sequence: Synthetic oligonucleotide"
acaugccccgcggcgcgccauuaac

SEQ ID NO: 1562 - RNA, 25 nt, Artificial Sequence
  source: /note="Description of Artificial Sequence: Synthetic oligonucleotide"
ccgccagauuugaaucgcgggaccc

SEQ ID NO: 1563 - RNA, 25 nt, Artificial Sequence
  source: /note="Description of Artificial Sequence: Synthetic oligonucleotide"
cguuggcagagguggcggcggcggc

SEQ ID NO: 1564 - RNA, 25 nt, Artificial Sequence
  source: /note="Description of Artificial Sequence: Synthetic oligonucleotide"
caugggugccccgacguugcccccu

SEQ ID NO: 1565 - RNA, 25 nt, Artificial Sequence
  source: /note="Description of Artificial Sequence: Synthetic oligonucleotide"
ugccuggcagcccuuucucaaggac

SEQ ID NO: 1566 - RNA, 25 nt, Artificial Sequence
  source: /note="Description of Artificial Sequence: Synthetic oligonucleotide"
ccaccgcaucucuacauucaagaac

SEQ ID NO: 1567 - RNA, 25 nt, Artificial Sequence
  source: /note="Description of Artificial Sequence: Synthetic oligonucleotide"
cuggcccuucuuggagggcugcgcc

SEQ ID NO: 1568 - RNA, 25 nt, Artificial Sequence
  source: /note="Description of Artificial Sequence: Synthetic oligonucleotide"
cugcaccccggagcggauggccgag

SEQ ID NO: 1569 - RNA, 25 nt, Artificial Sequence
  source: /note="Description of Artificial Sequence: Synthetic oligonucleotide"
ggcuggcuucauccacugccccacu

SEQ ID NO: 1570 - RNA, 25 nt, Artificial Sequence
  source: /note="Description of Artificial Sequence: Synthetic oligonucleotide"
ugagaacgagccagacuuggcccag

SEQ ID NO: 1571 - RNA, 25 nt, Artificial Sequence
  source: /note="Description of Artificial Sequence: Synthetic oligonucleotide"
guguuucuucugcuucaaggagcug

SEQ ID NO: 1572 - RNA, 25 nt, Artificial Sequence
  source: /note="Description of Artificial Sequence: Synthetic oligonucleotide"
ggaaggcugggagccagaugacgac

SEQ ID NO: 1573 - RNA, 25 nt, Artificial Sequence
  source: /note="Description of Artificial Sequence: Synthetic oligonucleotide"
ccccaugcaaaggaaaccaacaaua

SEQ ID NO: 1574 - RNA, 25 nt, Artificial Sequence
  source: /note="Description of Artificial Sequence: Synthetic oligonucleotide"
aagaagaaagaauuugaggaaacug

SEQ ID NO: 1575 - RNA, 25 nt, Artificial Sequence
  source: /note="Description of Artificial Sequence: Synthetic oligonucleotide"
gcggagaaagugcgccgugccaucg

SEQ ID NO: 1576 - RNA, 25 nt, Artificial Sequence
  source: /note="Description of Artificial Sequence: Synthetic oligonucleotide"
gagcagcuggcugccauggauugag

SEQ ID NO: 1577 - RNA, 25 nt, Artificial Sequence
  source: /note="Description of Artificial Sequence: Synthetic oligonucleotide"
ggccucuggccggagcugccugguc

SEQ ID NO: 1578 - RNA, 25 nt, Artificial Sequence
  source: /note="Description of Artificial Sequence: Synthetic oligonucleotide"
cccagaguggcugcaccacuuccag

SEQ ID NO: 1579 - RNA, 25 nt, Artificial Sequence
  source: /note="Description of Artificial Sequence: Synthetic oligonucleotide"
ggguuuauucccuggugccaccagc

SEQ ID NO: 1580 - RNA, 25 nt, Artificial Sequence
  source: /note="Description of Artificial Sequence: Synthetic oligonucleotide"
ccuuccugugggccccuuagcaaug

SEQ ID NO: 1581 - RNA, 25 nt, Artificial Sequence
  source: /note="Description of Artificial Sequence: Synthetic oligonucleotide"
gucuuaggaaaggagaucaacauuu

SEQ ID NO: 1582 - RNA, 25 nt, Artificial Sequence
  source: /note="Description of Artificial Sequence: Synthetic oligonucleotide"
uucaaauuagauguuucaacugugc

SEQ ID NO: 1583 - RNA, 25 nt, Artificial Sequence
  source: /note="Description of Artificial Sequence: Synthetic oligonucleotide"
cucuuguuuugucuugaaaguggca

SEQ ID NO: 1584 - RNA, 25 nt, Artificial Sequence
  source: /note="Description of Artificial Sequence: Synthetic oligonucleotide"
accagaggugcuucugccugugcag

SEQ ID NO: 1585 - RNA, 25 nt, Artificial Sequence
  source: /note="Description of Artificial Sequence: Synthetic oligonucleotide"
gcgggugcugcugguaacaguggcu

SEQ ID NO: 1586 - RNA, 25 nt, Artificial Sequence
  source: /note="Description of Artificial Sequence: Synthetic oligonucleotide"
ugcuucucucucucucucucuuuuu

SEQ ID NO: 1587 - RNA, 25 nt, Artificial Sequence
  source: /note="Description of Artificial Sequence: Synthetic oligonucleotide"
uugggggcucauuuuugcuguuuug

SEQ ID NO: 1588 - RNA, 25 nt, Artificial Sequence
  source: /note="Description of Artificial Sequence: Synthetic oligonucleotide"
gauucccgggcuuaccaggugagaa

SEQ ID NO: 1589 - RNA, 25 nt, Artificial Sequence
  source: /note="Description of Artificial Sequence: Synthetic oligonucleotide"
agugagggaggaagaaggcaguguc

SEQ ID NO: 1590 - RNA, 25 nt, Artificial Sequence
  source: /note="Description of Artificial Sequence: Synthetic oligonucleotide"
cccuuuugcuagagcugacagcuuu

SEQ ID NO: 1591 - RNA, 25 nt, Artificial Sequence
  source: /note="Description of Artificial Sequence: Synthetic oligonucleotide"
uguucgcgugggcagagccuuccac

SEQ ID NO: 1592 - RNA, 25 nt, Artificial Sequence
  source: /note="Description of Artificial Sequence: Synthetic oligonucleotide"
cagugaaugugucuggaccucaugu

SEQ ID NO: 1593 - RNA, 25 nt, Artificial Sequence
  source: /note="Description of Artificial Sequence: Synthetic oligonucleotide"
uuguugaggcugucacaguccugag

SEQ ID NO: 1594 - RNA, 25 nt, Artificial Sequence
  source: /note="Description of Artificial Sequence: Synthetic oligonucleotide"
guguggacuuggcaggugccuguug

SEQ ID NO: 1595 - RNA, 25 nt, Artificial Sequence
  source: /note="Description of Artificial Sequence: Synthetic oligonucleotide"
gaaucugagcugcagguuccuuauc

SEQ ID NO: 1596 - RNA, 25 nt, Artificial Sequence
  source: /note="Description of Artificial Sequence: Synthetic oligonucleotide"
cugucacaccugugccuccucagag

SEQ ID NO: 1597 - RNA, 25 nt, Artificial Sequence
  source: /note="Description of Artificial Sequence: Synthetic oligonucleotide"
ggacaguuuuuuuguuguuguguuu

SEQ ID NO: 1598 - RNA, 25 nt, Artificial Sequence
  source: /note="Description of Artificial Sequence: Synthetic oligonucleotide"
augcaugacuugugugugaugagag

SEQ ID NO: 1599 - RNA, 25 nt, Artificial Sequence
  source: /note="Description of Artificial Sequence: Synthetic oligonucleotide"
gaauggagacagagucccuggcucc

SEQ ID NO: 1600 - RNA, 25 nt, Artificial Sequence
  source: /note="Description of Artificial Sequence: Synthetic oligonucleotide"
cucuacuguuuaacaacauggcuuu

SEQ ID NO: 1601 - RNA, 25 nt, Artificial Sequence
  source: /note="Description of Artificial Sequence: Synthetic oligonucleotide"
ucuuauuuuguuugaauuguuaauu

SEQ ID NO: 1602 - RNA, 25 nt, Artificial Sequence
  source: /note="Description of Artificial Sequence: Synthetic oligonucleotide"
ucacagaauagcacaaacuacaauu

SEQ ID NO: 1603 - RNA, 25 nt, Artificial Sequence
  source: /note="Description of Artificial Sequence: Synthetic oligonucleotide"
uaaaacuaagcacaaagccauucua

SEQ ID NO: 1604 - RNA, 25 nt, Artificial Sequence
  source: /note="Description of Artificial Sequence: Synthetic oligonucleotide"
aagucauuggggaaacggggugaac

SEQ ID NO: 1605 - RNA, 25 nt, Artificial Sequence
  source: /note="Description of Artificial Sequence: Synthetic oligonucleotide"
cuucagguggaugaggagacagaau

SEQ ID NO: 1606 - RNA, 25 nt, Artificial Sequence
  source: /note="Description of Artificial Sequence: Synthetic oligonucleotide"
uagagugauaggaagcgucuggcag

SEQ ID NO: 1607 - RNA, 25 nt, Artificial Sequence
  source: /note="Description of Artificial Sequence: Synthetic oligonucleotide"
gauacuccuuuugccacugcugugu

SEQ ID NO: 1608 - RNA, 25 nt, Artificial Sequence
  source: /note="Description of Artificial Sequence: Synthetic oligonucleotide"
ugauuagacaggcccagugagccgc

SEQ ID NO: 1609 - RNA, 25 nt, Artificial Sequence
  source: /note="Description of Artificial Sequence: Synthetic oligonucleotide"
cggggcacaugcuggccgcuccucc

SEQ ID NO: 1610 - RNA, 25 nt, Artificial Sequence
  source: /note="Description of Artificial Sequence: Synthetic oligonucleotide"
ccucagaaaaaggcaguggccuaaa

SEQ ID NO: 1611 - RNA, 25 nt, Artificial Sequence
  source: /note="Description of Artificial Sequence: Synthetic oligonucleotide"
auccuuuuuaaaugacuuggcucga

SEQ ID NO: 1612 - RNA, 25 nt, Artificial Sequence
  source: /note="Description of Artificial Sequence: Synthetic oligonucleotide"
augcugugggggacuggcugggcug

SEQ ID NO: 1613 - RNA, 25 nt, Artificial Sequence
  source: /note="Description of Artificial Sequence: Synthetic oligonucleotide"
gcugcaggccgugugucugucagcc

SEQ ID NO: 1614 - RNA, 25 nt, Artificial Sequence
  source: /note="Description of Artificial Sequence: Synthetic oligonucleotide"
ccaaccuucacaucugucacguucu

SEQ ID NO: 1615 - RNA, 25 nt, Artificial Sequence
  source: /note="Description of Artificial Sequence: Synthetic oligonucleotide"
uccacacgggggagagacgcagucc

SEQ ID NO: 1616 - RNA, 25 nt, Artificial Sequence
  source: /note="Description of Artificial Sequence: Synthetic oligonucleotide"
cgcccagguccccgcuuucuuugga

SEQ ID NO: 1617 - RNA, 25 nt, Artificial Sequence
  source: /note="Description of Artificial Sequence: Synthetic oligonucleotide"
aggcagcagcucccgcagggcugaa

SEQ ID NO: 1618 - RNA, 25 nt, Artificial Sequence
  source: /note="Description of Artificial Sequence: Synthetic oligonucleotide"
agucuggcguaagaugauggauuug

SEQ ID NO: 1619 - RNA, 25 nt, Artificial Sequence
  source: /note="Description of Artificial Sequence: Synthetic oligonucleotide"
gauucgcccuccucccugucauaga

SEQ ID NO: 1620 - RNA, 25 nt, Artificial Sequence
  source: /note="Description of Artificial Sequence: Synthetic oligonucleotide"
agcugcaggguggauuguuacagcu

SEQ ID NO: 1621 - RNA, 25 nt, Artificial Sequence
  source: /note="Description of Artificial Sequence: Synthetic oligonucleotide"
uucgcuggaaaccucuggaggucau

SEQ ID NO: 1622 - RNA, 25 nt, Artificial Sequence
  source: /note="Description of Artificial Sequence: Synthetic oligonucleotide"
ucucggcuguuccugagaaauaaaa

SEQ ID NO: 1623 - RNA, 25 nt, Artificial Sequence
  source: /note="Description of Artificial Sequence: Synthetic oligonucleotide"
aagccugucauuucaaacacugcug

SEQ ID NO: 1624 - RNA, 25 nt, Artificial Sequence
  source: /note="Description of Artificial Sequence: Synthetic oligonucleotide"
guggacccuacuggguuuuuaaaau

SEQ ID NO: 1625 - RNA, 25 nt, Artificial Sequence
  source: /note="Description of Artificial Sequence: Synthetic oligonucleotide"
uauugucaguuuuucaucgucgucc

SEQ ID NO: 1626 - RNA, 25 nt, Artificial Sequence
  source: /note="Description of Artificial Sequence: Synthetic oligonucleotide"
ccuagccugccaacagccaucugcc

SEQ ID NO: 1627 - RNA, 25 nt, Artificial Sequence
  source: /note="Description of Artificial Sequence: Synthetic oligonucleotide"
ccagacagccgcagugaggaugagc

SEQ ID NO: 1628 - RNA, 25 nt, Artificial Sequence
  source: /note="Description of Artificial Sequence: Synthetic oligonucleotide"
cguccuggcagagacgcaguugucu

SEQ ID NO: 1629 - RNA, 25 nt, Artificial Sequence
  source: /note="Description of Artificial Sequence: Synthetic oligonucleotide"
ucugggcgcuugccagagccacgaa

SEQ ID NO: 1630 - RNA, 25 nt, Artificial Sequence
  source: /note="Description of Artificial Sequence: Synthetic oligonucleotide"
accccagaccuguuuguaucauccg

SEQ ID NO: 1631 - RNA, 25 nt, Artificial Sequence
  source: /note="Description of Artificial Sequence: Synthetic oligonucleotide"
gggcuccuuccgggcagaaacaacu

SEQ ID NO: 1632 - RNA, 25 nt, Artificial Sequence
  source: /note="Description of Artificial Sequence: Synthetic oligonucleotide"
ugaaaaugcacuucagacccacuua

SEQ ID NO: 1633 - RNA, 25 nt, Artificial Sequence
  source: /note="Description of Artificial Sequence: Synthetic oligonucleotide"
auuucugccacaucugagucggccu

SEQ ID NO: 1634 - RNA, 25 nt, Artificial Sequence
  source: /note="Description of Artificial Sequence: Synthetic oligonucleotide"
ugagauagacuuuucccucuaaacu

SEQ ID NO: 1635 - RNA, 25 nt, Artificial Sequence
  source: /note="Description of Artificial Sequence: Synthetic oligonucleotide"
ugggagaauaucacagugguuuuug

SEQ ID NO: 1636 - RNA, 25 nt, Artificial Sequence
  source: /note="Description of Artificial Sequence: Synthetic oligonucleotide"
guuagcagaaaaugcacuccagccu

SEQ ID NO: 1637 - RNA, 25 nt, Artificial Sequence
  source: /note="Description of Artificial Sequence: Synthetic oligonucleotide"
ucuguacucaucuaagcugcuuauu

SEQ ID NO: 1638 - RNA, 25 nt, Artificial Sequence
  source: /note="Description of Artificial Sequence: Synthetic oligonucleotide"
uuuugauauuugugucagucuguaa

SEQ ID NO: 1639 - RNA, 25 nt, Artificial Sequence
  source: /note="Description of Artificial Sequence: Synthetic oligonucleotide"
aauggauacuucacuuuaauaacug

SEQ ID NO: 1640 - RNA, 25 nt, Artificial Sequence
  source: /note="Description of Artificial Sequence: Synthetic oligonucleotide"
guugcuuaguaauuggcuuuguaga

SEQ ID NO: 1641 - RNA, 25 nt, Artificial Sequence
  source: /note="Description of Artificial Sequence: Synthetic oligonucleotide"
agaagcuggaaaaaaaugguuuugu

SEQ ID NO: 1642 - RNA, 25 nt, Artificial Sequence
  source: /note="Description of Artificial Sequence: Synthetic oligonucleotide"
ucuucaacuccuuugcaugccaggc

SEQ ID NO: 1643 - RNA, 25 nt, Artificial Sequence
  source: /note="Description of Artificial Sequence: Synthetic oligonucleotide"
cggugauguggaucucggcuucugu

SEQ ID NO: 1644 - RNA, 25 nt, Artificial Sequence
  source: /note="Description of Artificial Sequence: Synthetic oligonucleotide"
ugagccugugcugugggcagggcug

SEQ ID NO: 1645 - RNA, 25 nt, Artificial Sequence
  source: /note="Description of Artificial Sequence: Synthetic oligonucleotide"
gagcuggagccgccccucucagccc

SEQ ID NO: 1646 - RNA, 25 nt, Artificial Sequence
  source: /note="Description of Artificial Sequence: Synthetic oligonucleotide"
cgccugccacggccuuuccuuaaag

SEQ ID NO: 1647 - RNA, 25 nt, Artificial Sequence
  source: /note="Description of Artificial Sequence: Synthetic oligonucleotide"
ggccauccuuaaaaccagacccuca

SEQ ID NO: 1648 - RNA, 25 nt, Artificial Sequence
  source: /note="Description of Artificial Sequence: Synthetic oligonucleotide"
auggcuaccagcaccugaaagcuuc

SEQ ID NO: 1649 - RNA, 25 nt, Artificial Sequence
  source: /note="Description of Artificial Sequence: Synthetic oligonucleotide"
ccucgacaucuguuaauaaagccgu

SEQ ID NO: 1650 - RNA, 25 nt, Artificial Sequence
  source: /note="Description of Artificial Sequence: Synthetic oligonucleotide"
uaggcccuugucuaagugcaaccgc

SEQ ID NO: 1651 - RNA, 25 nt, Artificial Sequence
  source: /note="Description of Artificial Sequence: Synthetic oligonucleotide"
ccuagacuuucuuucagauacaugu

SEQ ID NO: 1652 - RNA, 25 nt, Artificial Sequence
  source: /note="Description of Artificial Sequence: Synthetic oligonucleotide"
uccacauguccauuuuucagguucu

SEQ ID NO: 1653 - RNA, 25 nt, Artificial Sequence
  source: /note="Description of Artificial Sequence: Synthetic oligonucleotide"
ucuaaguuggaguggagucugggaa

SEQ ID NO: 1654 - RNA, 25 nt, Artificial Sequence
  source: /note="Description of Artificial Sequence: Synthetic oligonucleotide"
aggguugugaaugaggcuucugggc

SEQ ID NO: 1655 - RNA, 25 nt, Artificial Sequence
  source: /note="Description of Artificial Sequence: Synthetic oligonucleotide"
cuaugggugagguuccaauggcagg

SEQ ID NO: 1656 - RNA, 25 nt, Artificial Sequence
  source: /note="Description of Artificial Sequence: Synthetic oligonucleotide"
guuagagccccucgggccaacugcc

SEQ ID NO: 1657 - RNA, 25 nt, Artificial Sequence
  source: /note="Description of Artificial Sequence: Synthetic oligonucleotide"
cauccuggaaaguagagacagcagu

SEQ ID NO: 1658 - RNA, 25 nt, Artificial Sequence
  source: /note="Description of Artificial Sequence: Synthetic oligonucleotide"
ugcccgcugcccagaagagaccagc

SEQ ID NO: 1659 - RNA, 25 nt, Artificial Sequence
  source: /note="Description of Artificial Sequence: Synthetic oligonucleotide"
caagccaaacuggagcccccauugc

SEQ ID NO: 1660 - RNA, 25 nt, Artificial Sequence
  source: /note="Description of Artificial Sequence: Synthetic oligonucleotide"
caggcugucgccauguggaaagagu

SEQ ID NO: 1661 - RNA, 25 nt, Artificial Sequence
  source: /note="Description of Artificial Sequence: Synthetic oligonucleotide"
uaacucacaauugccaauaaagucu

SEQ ID NO: 1662 - RNA, 25 nt, Artificial Sequence
  source: /note="Description of Artificial Sequence: Synthetic oligonucleotide"
ucaugugguuuuaucuaaaaaaaaa

SEQ ID NO: 1663 - RNA, 25 nt, Artificial Sequence
  source: /note="Description of Artificial Sequence: Synthetic oligonucleotide"
ccccauugggccgggcacgguggcu

SEQ ID NO: 1664 - RNA, 25 nt, Artificial Sequence
  source: /note="Description of Artificial Sequence: Synthetic oligonucleotide"
uuacgccuguaauaccagcacuuug

SEQ ID NO: 1665 - RNA, 25 nt, Artificial Sequence
  source: /note="Description of Artificial Sequence: Synthetic oligonucleotide"
gggaggccgaggcgggcggaucacg

SEQ ID NO: 1666 - RNA, 25 nt, Artificial Sequence
  source: /note="Description of Artificial Sequence: Synthetic oligonucleotide"
gagagaggaacauaaaaagcauucg

SEQ ID NO: 1667 - RNA, 25 nt, Artificial Sequence
  source: /note="Description of Artificial Sequence: Synthetic oligonucleotide"
guccgguugcgcuuuccuuucuguc

SEQ ID NO: 1668 - RNA, 25 nt, Artificial Sequence
  source: /note="Description of Artificial Sequence: Synthetic oligonucleotide"
caagaagcaguuugaagaauuaacc

SEQ ID NO: 1669 - RNA, 25 nt, Artificial Sequence
  source: /note="Description of Artificial Sequence: Synthetic oligonucleotide"
ccuuggugaauuuuugaaacuggac

SEQ ID NO: 1670 - RNA, 25 nt, Artificial Sequence
  source: /note="Description of Artificial Sequence: Synthetic oligonucleotide"
cagagaaagagccaagaacaaaauu

SEQ ID NO: 1671 - RNA, 25 nt, Artificial Sequence
  source: /note="Description of Artificial Sequence: Synthetic oligonucleotide"
ugcaaaggaaaccaacaauaagaag

SEQ ID NO: 1672 - RNA, 25 nt, Artificial Sequence
  source: /note="Description of Artificial Sequence: Synthetic oligonucleotide"
gaaagaauuugaggaaacugcggag

SEQ ID NO: 1673 - RNA, 25 nt, Artificial Sequence
  source: /note="Description of Artificial Sequence: Synthetic oligonucleotide"
gaaagugcgccgugccaucgagcag

SEQ ID NO: 1674 - RNA, 25 nt, Artificial Sequence
  source: /note="Description of Artificial Sequence: Synthetic oligonucleotide"
gcuggcugccauggauugaggccuc

SEQ ID NO: 1675 - RNA, 25 nt, Artificial Sequence
  source: /note="Description of Artificial Sequence: Synthetic oligonucleotide"
cuggccggagcugccuggucccaga

SEQ ID NO: 1676 - RNA, 25 nt, Artificial Sequence
  source: /note="Description of Artificial Sequence: Synthetic oligonucleotide"
aguggcugcaccacuuccaggguuu

SEQ ID NO: 1677 - RNA, 25 nt, Artificial Sequence
  source: /note="Description of Artificial Sequence: Synthetic oligonucleotide"
uauucccuggugccaccagccuucc

SEQ ID NO: 1678 - RNA, 25 nt, Artificial Sequence
  source: /note="Description of Artificial Sequence: Synthetic oligonucleotide"
cugugggccccuuagcaaugucuua

SEQ ID NO: 1679 - RNA, 25 nt, Artificial Sequence
  source: /note="Description of Artificial Sequence: Synthetic oligonucleotide"
aggaaaggagaucaacauuuucaaa

SEQ ID NO: 1680 - RNA, 25 nt, Artificial Sequence
  source: /note="Description of Artificial Sequence: Synthetic oligonucleotide"
auuagauguuucaacugugcucuug

SEQ ID NO: 1681 - RNA, 25 nt, Artificial Sequence
  source: /note="Description of Artificial Sequence: Synthetic oligonucleotide"
guuuugucuugaaaguggcaccaga

SEQ ID NO: 1682 - RNA, 25 nt, Artificial Sequence
  source: /note="Description of Artificial Sequence: Synthetic oligonucleotide"
aggugcuucugccugugcagcgggu

SEQ ID NO: 1683 - RNA, 25 nt, Artificial Sequence
  source: /note="Description of Artificial Sequence: Synthetic oligonucleotide"
ugcugcugguaacaguggcugcuuc

SEQ ID NO: 1684 - RNA, 25 nt, Artificial Sequence
  source: /note="Description of Artificial Sequence: Synthetic oligonucleotide"
cucucucucucucucuuuuuugggg

SEQ ID NO: 1685 - RNA, 25 nt, Artificial Sequence
  source: /note="Description of Artificial Sequence: Synthetic oligonucleotide"
ggcucauuuuugcuguuuugauucc

SEQ ID NO: 1686 - RNA, 25 nt, Artificial Sequence
  source: /note="Description of Artificial Sequence: Synthetic oligonucleotide"
ccgggcuuaccaggugagaagugag

SEQ ID NO: 1687 - RNA, 25 nt, Artificial Sequence
  source: /note="Description of Artificial Sequence: Synthetic oligonucleotide"
gggaggaagaaggcagugucccuuu

SEQ ID NO: 1688 - RNA, 25 nt, Artificial Sequence
  source: /note="Description of Artificial Sequence: Synthetic oligonucleotide"
uugcuagagcugacagcuuuguucg

SEQ ID NO: 1689 - RNA, 25 nt, Artificial Sequence
  source: /note="Description of Artificial Sequence: Synthetic oligonucleotide"
gcgugggcagagccuuccacaguga

SEQ ID NO: 1690 - RNA, 25 nt, Artificial Sequence
  source: /note="Description of Artificial Sequence: Synthetic oligonucleotide"
aaugugucuggaccucauguuguug

SEQ ID NO: 1691 - RNA, 25 nt, Artificial Sequence
  source: /note="Description of Artificial Sequence: Synthetic oligonucleotide"
gaggcugucacaguccugagugugg

SEQ ID NO: 1692 - RNA, 25 nt, Artificial Sequence
  source: /note="Description of Artificial Sequence: Synthetic oligonucleotide"
gacuuggcaggugccuguugaaucu

SEQ ID NO: 1693 - RNA, 25 nt, Artificial Sequence
  source: /note="Description of Artificial Sequence: Synthetic oligonucleotide"
ugagcugcagguuccuuaucuguca

SEQ ID NO: 1694 - RNA, 25 nt, Artificial Sequence
  source: /note="Description of Artificial Sequence: Synthetic oligonucleotide"
acaccugugccuccucagaggacag

SEQ ID NO: 1695 - RNA, 25 nt, Artificial Sequence
  source: /note="Description of Artificial Sequence: Synthetic oligonucleotide"
guuuuuuuguuguuguguuuuuuug

SEQ ID NO: 1696 - RNA, 25 nt, Artificial Sequence
  source: /note="Description of Artificial Sequence: Synthetic oligonucleotide"
ugacuugugugugaugagagaaugg

SEQ ID NO: 1697 - RNA, 25 nt, Artificial Sequence
  source: /note="Description of Artificial Sequence: Synthetic oligonucleotide"
gagacagagucccuggcuccucuac

SEQ ID NO: 1698 - RNA, 25 nt, Artificial Sequence
  source: /note="Description of Artificial Sequence: Synthetic oligonucleotide"
cuguuuaacaacauggcuuucuuau

SEQ ID NO: 1699 - RNA, 25 nt, Artificial Sequence
  source: /note="Description of Artificial Sequence: Synthetic oligonucleotide"
uuuuguuugaauuguuaauucacag

SEQ ID NO: 1700 - RNA, 25 nt, Artificial Sequence
  source: /note="Description of Artificial Sequence: Synthetic oligonucleotide"
gaauagcacaaacuacaauuaaaac

SEQ ID NO: 1701 - RNA, 25 nt, Artificial Sequence
  source: /note="Description of Artificial Sequence: Synthetic oligonucleotide"
cuaagcacaaagccauucuaaguca

SEQ ID NO: 1702 - RNA, 25 nt, Artificial Sequence
  source: /note="Description of Artificial Sequence: Synthetic oligonucleotide"
auuggggaaacggggugaacuucag

SEQ ID NO: 1703 - RNA, 25 nt, Artificial Sequence
  source: /note="Description of Artificial Sequence: Synthetic oligonucleotide"
gguggaugaggagacagaauagagu

SEQ ID NO: 1704 - RNA, 25 nt, Artificial Sequence
  source: /note="Description of Artificial Sequence: Synthetic oligonucleotide"
ugauaggaagcgucuggcagauacu

SEQ ID NO: 1705 - RNA, 25 nt, Artificial Sequence
  source: /note="Description of Artificial Sequence: Synthetic oligonucleotide"
uccuuuugccacugcugugugauua

SEQ ID NO: 1706 - RNA, 25 nt, Artificial Sequence
  source: /note="Description of Artificial Sequence: Synthetic oligonucleotide"
agacaggcccagugagccgcggggc

SEQ ID NO: 1707 - RNA, 25 nt, Artificial Sequence
  source: /note="Description of Artificial Sequence: Synthetic oligonucleotide"
cacaugcuggccgcuccucccucag

SEQ ID NO: 1708 - RNA, 25 nt, Artificial Sequence
  source: /note="Description of Artificial Sequence: Synthetic oligonucleotide"
gaaaaaggcaguggccuaaauccuu

SEQ ID NO: 1709 - RNA, 25 nt, Artificial Sequence
  source: /note="Description of Artificial Sequence: Synthetic oligonucleotide"
uuuuaaaugacuuggcucgaugcug

SEQ ID NO: 1710 - RNA, 25 nt, Artificial Sequence
  source: /note="Description of Artificial Sequence: Synthetic oligonucleotide"
gugggggacuggcugggcugcugca

SEQ ID NO: 1711 - RNA, 25 nt, Artificial Sequence
  source: /note="Description of Artificial Sequence: Synthetic oligonucleotide"
aggccgugugucugucagcccaacc

SEQ ID NO: 1712 - RNA, 25 nt, Artificial Sequence
  source: /note="Description of Artificial Sequence: Synthetic oligonucleotide"
cuucacaucugucacguucuccaca

SEQ ID NO: 1713 - RNA, 25 nt, Artificial Sequence
  source: /note="Description of Artificial Sequence: Synthetic oligonucleotide"
acgggggagagacgcaguccgccca

SEQ ID NO: 1714 - RNA, 25 nt, Artificial Sequence
  source: /note="Description of Artificial Sequence: Synthetic oligonucleotide"
agguccccgcuuucuuuggaggcag

SEQ ID NO: 1715 - RNA, 25 nt, Artificial Sequence
  source: /note="Description of Artificial Sequence: Synthetic oligonucleotide"
gcagcucccgcagggcugaagucug

SEQ ID NO: 1716 - RNA, 25 nt, Artificial Sequence
  source: /note="Description of Artificial Sequence: Synthetic oligonucleotide"
ggcguaagaugauggauuugauucg

SEQ ID NO: 1717 - RNA, 25 nt, Artificial Sequence
  source: /note="Description of Artificial Sequence: Synthetic oligonucleotide"
gcccuccucccugucauagagcugc

SEQ ID NO: 1718 - RNA, 25 nt, Artificial Sequence
  source: /note="Description of Artificial Sequence: Synthetic oligonucleotide"
caggguggauuguuacagcuucgcu

SEQ ID NO: 1719 - RNA, 25 nt, Artificial Sequence
  source: /note="Description of Artificial Sequence: Synthetic oligonucleotide"
uggaaaccucuggaggucaucucgg

SEQ ID NO: 1720 - RNA, 25 nt, Artificial Sequence
  source: /note="Description of Artificial Sequence: Synthetic oligonucleotide"
gcuguuccugagaaauaaaaagccu

SEQ ID NO: 1721 - RNA, 25 nt, Artificial Sequence
  source: /note="Description of Artificial Sequence: Synthetic oligonucleotide"
ugucauuucaaacacugcuguggac

SEQ ID NO: 1722 - RNA, 25 nt, Artificial Sequence
  source: /note="Description of Artificial Sequence: Synthetic oligonucleotide"
cccuacuggguuuuuaaaauauugu

SEQ ID NO: 1723 - RNA, 25 nt, Artificial Sequence
  source: /note="Description of Artificial Sequence: Synthetic oligonucleotide"
ucaguuuuucaucgucgucccuagc

SEQ ID NO: 1724 - RNA, 25 nt, Artificial Sequence
  source: /note="Description of Artificial Sequence: Synthetic oligonucleotide"
ccugccaacagccaucugcccagac

SEQ ID NO: 1725 - RNA, 25 nt, Artificial Sequence
  source: /note="Description of Artificial Sequence: Synthetic oligonucleotide"
cagccgcagugaggaugagcguccu

SEQ ID NO: 1726 - RNA, 25 nt, Artificial Sequence
  source: /note="Description of Artificial Sequence: Synthetic oligonucleotide"
uggcagagacgcaguugucucuggg

SEQ ID NO: 1727 - RNA, 25 nt, Artificial Sequence
  source: /note="Description of Artificial Sequence: Synthetic oligonucleotide"
gcgcuugccagagccacgaacccca

SEQ ID NO: 1728 - RNA, 25 nt, Artificial Sequence
  source: /note="Description of Artificial Sequence: Synthetic oligonucleotide"
agaccuguuuguaucauccgggcuc

SEQ ID NO: 1729 - RNA, 25 nt, Artificial Sequence
  source: /note="Description of Artificial Sequence: Synthetic oligonucleotide"
ccuuccgggcagaaacaacugaaaa

SEQ ID NO: 1730 - RNA, 25 nt, Artificial Sequence
  source: /note="Description of Artificial Sequence: Synthetic oligonucleotide"
augcacuucagacccacuuauuucu

SEQ ID NO: 1731 - RNA, 25 nt, Artificial Sequence
  source: /note="Description of Artificial Sequence: Synthetic oligonucleotide"
ugccacaucugagucggccugagau

SEQ ID NO: 1732 - RNA, 25 nt, Artificial Sequence
  source: /note="Description of Artificial Sequence: Synthetic oligonucleotide"
uagacuuuucccucuaaacugggag

SEQ ID NO: 1733 - RNA, 25 nt, Artificial Sequence
  source: /note="Description of Artificial Sequence: Synthetic oligonucleotide"
gaauaucacagugguuuuuguuagc

SEQ ID NO: 1734 - RNA, 25 nt, Artificial Sequence
  source: /note="Description of Artificial Sequence: Synthetic oligonucleotide"
cagaaaaugcacuccagccucugua

SEQ ID NO: 1735 - RNA, 25 nt, Artificial Sequence
  source: /note="Description of Artificial Sequence: Synthetic oligonucleotide"
acucaucuaagcugcuuauuuuuga

SEQ ID NO: 1736 - RNA, 25 nt, Artificial Sequence
  source: /note="Description of Artificial Sequence: Synthetic oligonucleotide"
auauuugugucagucuguaaaugga

SEQ ID NO: 1737 - RNA, 25 nt, Artificial Sequence
  source: /note="Description of Artificial Sequence: Synthetic oligonucleotide"
auacuucacuuuaauaacuguugcu

SEQ ID NO: 1738 - RNA, 25 nt, Artificial Sequence
  source: /note="Description of Artificial Sequence: Synthetic oligonucleotide"
uuaguaauuggcuuuguagagaagc

SEQ ID NO: 1739 - RNA, 25 nt, Artificial Sequence
  source: /note="Description of Artificial Sequence: Synthetic oligonucleotide"
cuggaaaaaaaugguuuugucuuca

SEQ ID NO: 1740 - RNA, 25 nt, Artificial Sequence
  source: /note="Description of Artificial Sequence: Synthetic oligonucleotide"
aacuccuuugcaugccaggcgguga

SEQ ID NO: 1741 - RNA, 25 nt, Artificial Sequence
  source: /note="Description of Artificial Sequence: Synthetic oligonucleotide"
auguggaucucggcuucugugagcc

SEQ ID NO: 1742 - RNA, 25 nt, Artificial Sequence
  source: /note="Description of Artificial Sequence: Synthetic oligonucleotide"
cugugcugugggcagggcugagcug

SEQ ID NO: 1743 - RNA, 25 nt, Artificial Sequence
  source: /note="Description of Artificial Sequence: Synthetic oligonucleotide"
ggagccgccccucucagcccgccug

SEQ ID NO: 1744 - RNA, 25 nt, Artificial Sequence
  source: /note="Description of Artificial Sequence: Synthetic oligonucleotide"
gccacggccuuuccuuaaaggccau

SEQ ID NO: 1745 - RNA, 25 nt, Artificial Sequence
  source: /note="Description of Artificial Sequence: Synthetic oligonucleotide"
uccuuaaaaccagacccucauggcu

SEQ ID NO: 1746 - RNA, 25 nt, Artificial Sequence
  source: /note="Description of Artificial Sequence: Synthetic oligonucleotide"
uaccagcaccugaaagcuuccucga

SEQ ID NO: 1747 - RNA, 25 nt, Artificial Sequence
  source: /note="Description of Artificial Sequence: Synthetic oligonucleotide"
acaucuguuaauaaagccguaggcc

SEQ ID NO: 1748 - RNA, 25 nt, Artificial Sequence
  source: /note="Description of Artificial Sequence: Synthetic oligonucleotide"
ccuugucuaagugcaaccgccuaga

SEQ ID NO: 1749 - RNA, 25 nt, Artificial Sequence
  source: /note="Description of Artificial Sequence: Synthetic oligonucleotide"
acuuucuuucagauacauguccaca

SEQ ID NO: 1750 - RNA, 25 nt, Artificial Sequence
  source: /note="Description of Artificial Sequence: Synthetic oligonucleotide"
auguccauuuuucagguucucuaag

SEQ ID NO: 1751 - RNA, 25 nt, Artificial Sequence
  source: /note="Description of Artificial Sequence: Synthetic oligonucleotide"
guuggaguggagucugggaaggguu

SEQ ID NO: 1752 - RNA, 25 nt, Artificial Sequence
  source: /note="Description of Artificial Sequence: Synthetic oligonucleotide"
ugugaaugaggcuucugggcuaugg

SEQ ID NO: 1753 - RNA, 25 nt, Artificial Sequence
  source: /note="Description of Artificial Sequence: Synthetic oligonucleotide"
ggugagguuccaauggcagguuaga

SEQ ID NO: 1754 - RNA, 25 nt, Artificial Sequence
  source: /note="Description of Artificial Sequence: Synthetic oligonucleotide"
agccccucgggccaacugccauccu

SEQ ID NO: 1755 - RNA, 25 nt, Artificial Sequence
  source: /note="Description of Artificial Sequence: Synthetic oligonucleotide"
uggaaaguagagacagcagugcccg

SEQ ID NO: 1756 - RNA, 25 nt, Artificial Sequence
  source: /note="Description of Artificial Sequence: Synthetic oligonucleotide"
gcugcccagaagagaccagcaagcc

SEQ ID NO: 1757 - RNA, 25 nt, Artificial Sequence
  source: /note="Description of Artificial Sequence: Synthetic oligonucleotide"
caaacuggagcccccauugcaggcu

SEQ ID NO: 1758 - RNA, 25 nt, Artificial Sequence
  source: /note="Description of Artificial Sequence: Synthetic oligonucleotide"
ugucgccauguggaaagaguaacuc

SEQ ID NO: 1759 - RNA, 25 nt, Artificial Sequence
  source: /note="Description of Artificial Sequence: Synthetic oligonucleotide"
cacaauugccaauaaagucucaugu

SEQ ID NO: 1760 - RNA, 25 nt, Artificial Sequence
  source: /note="Description of Artificial Sequence: Synthetic oligonucleotide"
ccccauagaggaacauaaaaagcau

SEQ ID NO: 1761 - RNA, 25 nt, Artificial Sequence
  source: /note="Description of Artificial Sequence: Synthetic oligonucleotide"
uucguccgguugcgcuuuccuuucu

SEQ ID NO: 1762 - RNA, 25 nt, Artificial Sequence
  source: /note="Description of Artificial Sequence: Synthetic oligonucleotide"
ugucaagaagcaguuugaagaauua

SEQ ID NO: 1763 - RNA, 25 nt, Artificial Sequence
  source: /note="Description of Artificial Sequence: Synthetic oligonucleotide"
aacccuuggugaauuuuugaaacug

SEQ ID NO: 1764 - RNA, 25 nt, Artificial Sequence
  source: /note="Description of Artificial Sequence: Synthetic oligonucleotide"
ggacagagaaagagccaagaacaaa

SEQ ID NO: 1765 - RNA, 25 nt, Artificial Sequence
  source: /note="Description of Artificial Sequence: Synthetic oligonucleotide"
aauugcaaaggaaaccaacaauaag

SEQ ID NO: 1766 - RNA, 25 nt, Artificial Sequence
  source: /note="Description of Artificial Sequence: Synthetic oligonucleotide"
gaagaaagaauuugaggaaacugcg

SEQ ID NO: 1767 - RNA, 25 nt, Artificial Sequence
  source: /note="Description of Artificial Sequence: Synthetic oligonucleotide"
ggagaaagugcgccgugccaucgag

SEQ ID NO: 1768 - RNA, 25 nt, Artificial Sequence
  source: /note="Description of Artificial Sequence: Synthetic oligonucleotide"
gcagcuggcugccauggauugaggc

SEQ ID NO: 1769 - RNA, 25 nt, Artificial Sequence
  source: /note="Description of Artificial Sequence: Synthetic oligonucleotide"
ccucuggccggagcugccugguccc

SEQ ID NO: 1770 - RNA, 25 nt, Artificial Sequence
  source: /note="Description of Artificial Sequence: Synthetic oligonucleotide"
cagaguggcugcaccacuuccaggg

SEQ ID NO: 1771 - RNA, 25 nt, Artificial Sequence
  source: /note="Description of Artificial Sequence: Synthetic oligonucleotide"
guuuauucccuggugccaccagccu

SEQ ID NO: 1772 - RNA, 25 nt, Artificial Sequence
  source: /note="Description of Artificial Sequence: Synthetic oligonucleotide"
uuccugugggccccuuagcaauguc

SEQ ID NO: 1773 - RNA, 25 nt, Artificial Sequence
  source: /note="Description of Artificial Sequence: Synthetic oligonucleotide"
cuuaggaaaggagaucaacauuuuc

SEQ ID NO: 1774 - RNA, 25 nt, Artificial Sequence
  source: /note="Description of Artificial Sequence: Synthetic oligonucleotide"
caaauuagauguuucaacugugcuc

SEQ ID NO: 1775 - RNA, 25 nt, Artificial Sequence
  source: /note="Description of Artificial Sequence: Synthetic oligonucleotide"
cuuguuuugucuugaaaguggcacc

SEQ ID NO: 1776 - RNA, 25 nt, Artificial Sequence
  source: /note="Description of Artificial Sequence: Synthetic oligonucleotide"
cagaggugcuucugccugugcagcg

SEQ ID NO: 1777 - RNA, 25 nt, Artificial Sequence
  source: /note="Description of Artificial Sequence: Synthetic oligonucleotide"
gggugcugcugguaacaguggcugc

SEQ ID NO: 1778 - RNA, 25 nt, Artificial Sequence
  source: /note="Description of Artificial Sequence: Synthetic oligonucleotide"
cuucucucucucucucucuuuuuug

SEQ ID NO: 1779 - RNA, 25 nt, Artificial Sequence
  source: /note="Description of Artificial Sequence: Synthetic oligonucleotide"
gggggcucauuuuugcuguuuugau

SEQ ID NO: 1780 - RNA, 25 nt, Artificial Sequence
  source: /note="Description of Artificial Sequence: Synthetic oligonucleotide"
uucccgggcuuaccaggugagaagu

SEQ ID NO: 1781 - RNA, 25 nt, Artificial Sequence
  source: /note="Description of Artificial Sequence: Synthetic oligonucleotide"
ugagggaggaagaaggcaguguccc

SEQ ID NO: 1782 - RNA, 25 nt, Artificial Sequence
  source: /note="Description of Artificial Sequence: Synthetic oligonucleotide"
cuuuugcuagagcugacagcuuugu

SEQ ID NO: 1783 - RNA, 25 nt, Artificial Sequence
  source: /note="Description of Artificial Sequence: Synthetic oligonucleotide"
uucgcgugggcagagccuuccacag

SEQ ID NO: 1784 - RNA, 25 nt, Artificial Sequence
  source: /note="Description of Artificial Sequence: Synthetic oligonucleotide"
gugaaugugucuggaccucauguug

SEQ ID NO: 1785 - RNA, 25 nt, Artificial Sequence
  source: /note="Description of Artificial Sequence: Synthetic oligonucleotide"
guugaggcugucacaguccugagug

SEQ ID NO: 1786 - RNA, 25 nt, Artificial Sequence
  source: /note="Description of Artificial Sequence: Synthetic oligonucleotide"
guggacuuggcaggugccuguugaa

SEQ ID NO: 1787 - RNA, 25 nt, Artificial Sequence
  source: /note="Description of Artificial Sequence: Synthetic oligonucleotide"
aucugagcugcagguuccuuaucug

SEQ ID NO: 1788 - RNA, 25 nt, Artificial Sequence
  source: /note="Description of Artificial Sequence: Synthetic oligonucleotide"
gucacaccugugccuccucagagga

SEQ ID NO: 1789 - RNA, 25 nt, Artificial Sequence
  source: /note="Description of Artificial Sequence: Synthetic oligonucleotide"
acaguuuuuuuguuguuguguuuuu

SEQ ID NO: 1790 - RNA, 25 nt, Artificial Sequence
  source: /note="Description of Artificial Sequence: Synthetic oligonucleotide"
gcaugacuugugugugaugagagaa

SEQ ID NO: 1791 - RNA, 25 nt, Artificial Sequence
  source: /note="Description of Artificial Sequence: Synthetic oligonucleotide"
auggagacagagucccuggcuccuc

SEQ ID NO: 1792 - RNA, 25 nt, Artificial Sequence
  source: /note="Description of Artificial Sequence: Synthetic oligonucleotide"
cuacuguuuaacaacauggcuuucu

SEQ ID NO: 1793 - RNA, 25 nt, Artificial Sequence
  source: /note="Description of Artificial Sequence: Synthetic oligonucleotide"
uuauuuuguuugaauuguuaauuca

SEQ ID NO: 1794 - RNA, 25 nt, Artificial Sequence
  source: /note="Description of Artificial Sequence: Synthetic oligonucleotide"
acagaauagcacaaacuacaauuaa

SEQ ID NO: 1795 - RNA, 25 nt, Artificial Sequence
  source: /note="Description of Artificial Sequence: Synthetic oligonucleotide"
aaacuaagcacaaagccauucuaag

SEQ ID NO: 1796 - RNA, 25 nt, Artificial Sequence
  source: /note="Description of Artificial Sequence: Synthetic oligonucleotide"
gucauuggggaaacggggugaacuu

SEQ ID NO: 1797 - RNA, 25 nt, Artificial Sequence
  source: /note="Description of Artificial Sequence: Synthetic oligonucleotide"
ucagguggaugaggagacagaauag

SEQ ID NO: 1798 - RNA, 25 nt, Artificial Sequence
  source: /note="Description of Artificial Sequence: Synthetic oligonucleotide"
gagugauaggaagcgucuggcagau

SEQ ID NO: 1799 - RNA, 25 nt, Artificial Sequence
  source: /note="Description of Artificial Sequence: Synthetic oligonucleotide"
uacuccuuuugccacugcuguguga

SEQ ID NO: 1800 - RNA, 25 nt, Artificial Sequence
  source: /note="Description of Artificial Sequence: Synthetic oligonucleotide"
auuagacaggcccagugagccgcgg

SEQ ID NO: 1801 - RNA, 25 nt, Artificial Sequence
  source: /note="Description of Artificial Sequence: Synthetic oligonucleotide"
gggcacaugcuggccgcuccucccu

SEQ ID NO: 1802 - RNA, 25 nt, Artificial Sequence
  source: /note="Description of Artificial Sequence: Synthetic oligonucleotide"
ucagaaaaaggcaguggccuaaauc

SEQ ID NO: 1803 - RNA, 25 nt, Artificial Sequence
  source: /note="Description of Artificial Sequence: Synthetic oligonucleotide"
ccuuuuuaaaugacuuggcucgaug

SEQ ID NO: 1804 - RNA, 25 nt, Artificial Sequence
  source: /note="Description of Artificial Sequence: Synthetic oligonucleotide"
gcugugggggacuggcugggcugcu

SEQ ID NO: 1805 - RNA, 25 nt, Artificial Sequence
  source: /note="Description of Artificial Sequence: Synthetic oligonucleotide"
ugcaggccgugugucugucagccca

SEQ ID NO: 1806 - RNA, 25 nt, Artificial Sequence
  source: /note="Description of Artificial Sequence: Synthetic oligonucleotide"
aaccuucacaucugucacguucucc

SEQ ID NO: 1807 - RNA, 25 nt, Artificial Sequence
  source: /note="Description of Artificial Sequence: Synthetic oligonucleotide"
cacacgggggagagacgcaguccgc

SEQ ID NO: 1808 - RNA, 25 nt, Artificial Sequence
  source: /note="Description of Artificial Sequence: Synthetic oligonucleotide"
cccagguccccgcuuucuuuggagg

SEQ ID NO: 1809 - RNA, 25 nt, Artificial Sequence
  source: /note="Description of Artificial Sequence: Synthetic oligonucleotide"
gcagcagcucccgcagggcugaagu

SEQ ID NO: 1810 - RNA, 25 nt, Artificial Sequence
  source: /note="Description of Artificial Sequence: Synthetic oligonucleotide"
ucuggcguaagaugauggauuugau

SEQ ID NO: 1811 - RNA, 25 nt, Artificial Sequence
  source: /note="Description of Artificial Sequence: Synthetic oligonucleotide"
uucgcccuccucccugucauagagc

SEQ ID NO: 1812 - RNA, 25 nt, Artificial Sequence
  source: /note="Description of Artificial Sequence: Synthetic oligonucleotide"
cugcaggguggauuguuacagcuuc

SEQ ID NO: 1813 - RNA, 25 nt, Artificial Sequence
  source: /note="Description of Artificial Sequence: Synthetic oligonucleotide"
cgcuggaaaccucuggaggucaucu

SEQ ID NO: 1814 - RNA, 25 nt, Artificial Sequence
  source: /note="Description of Artificial Sequence: Synthetic oligonucleotide"
ucggcuguuccugagaaauaaaaag

SEQ ID NO: 1815 - RNA, 25 nt, Artificial Sequence
  source: /note="Description of Artificial Sequence: Synthetic oligonucleotide"
gccugucauuucaaacacugcugug

SEQ ID NO: 1816 - RNA, 25 nt, Artificial Sequence
  source: /note="Description of Artificial Sequence: Synthetic oligonucleotide"
ggacccuacuggguuuuuaaaauau

SEQ ID NO: 1817 - RNA, 25 nt, Artificial Sequence
  source: /note="Description of Artificial Sequence: Synthetic oligonucleotide"
uugucaguuuuucaucgucgucccu

SEQ ID NO: 1818 - RNA, 25 nt, Artificial Sequence
  source: /note="Description of Artificial Sequence: Synthetic oligonucleotide"
uagccugccaacagccaucugccca

SEQ ID NO: 1819 - RNA, 25 nt, Artificial Sequence
  source: /note="Description of Artificial Sequence: Synthetic oligonucleotide"
agacagccgcagugaggaugagcgu

SEQ ID NO: 1820 - RNA, 25 nt, Artificial Sequence
  source: /note="Description of Artificial Sequence: Synthetic oligonucleotide"
uccuggcagagacgcaguugucucu

SEQ ID NO: 1821 - RNA, 25 nt, Artificial Sequence
  source: /note="Description of Artificial Sequence: Synthetic oligonucleotide"
ugggcgcuugccagagccacgaacc

SEQ ID NO: 1822 - RNA, 25 nt, Artificial Sequence
  source: /note="Description of Artificial Sequence: Synthetic oligonucleotide"
cccagaccuguuuguaucauccggg

SEQ ID NO: 1823 - RNA, 25 nt, Artificial Sequence
  source: /note="Description of Artificial Sequence: Synthetic oligonucleotide"
gcuccuuccgggcagaaacaacuga

SEQ ID NO: 1824 - RNA, 25 nt, Artificial Sequence
  source: /note="Description of Artificial Sequence: Synthetic oligonucleotide"
aaaaugcacuucagacccacuuauu

SEQ ID NO: 1825 - RNA, 25 nt, Artificial Sequence
  source: /note="Description of Artificial Sequence: Synthetic oligonucleotide"
uucugccacaucugagucggccuga

SEQ ID NO: 1826 - RNA, 25 nt, Artificial Sequence
  source: /note="Description of Artificial Sequence: Synthetic oligonucleotide"
agauagacuuuucccucuaaacugg

SEQ ID NO: 1827 - RNA, 25 nt, Artificial Sequence
  source: /note="Description of Artificial Sequence: Synthetic oligonucleotide"
ggagaauaucacagugguuuuuguu

SEQ ID NO: 1828 - RNA, 25 nt, Artificial Sequence
  source: /note="Description of Artificial Sequence: Synthetic oligonucleotide"
uagcagaaaaugcacuccagccucu

SEQ ID NO: 1829 - RNA, 25 nt, Artificial Sequence
  source: /note="Description of Artificial Sequence: Synthetic oligonucleotide"
uguacucaucuaagcugcuuauuuu

SEQ ID NO: 1830 - RNA, 25 nt, Artificial Sequence
  source: /note="Description of Artificial Sequence: Synthetic oligonucleotide"
uugauauuugugucagucuguaaau

SEQ ID NO: 1831 - RNA, 25 nt, Artificial Sequence
  source: /note="Description of Artificial Sequence: Synthetic oligonucleotide"
uggauacuucacuuuaauaacuguu

SEQ ID NO: 1832 - RNA, 25 nt, Artificial Sequence
  source: /note="Description of Artificial Sequence: Synthetic oligonucleotide"
ugcuuaguaauuggcuuuguagaga

SEQ ID NO: 1833 - RNA, 25 nt, Artificial Sequence
  source: /note="Description of Artificial Sequence: Synthetic oligonucleotide"
aagcuggaaaaaaaugguuuugucu

SEQ ID NO: 1834 - RNA, 25 nt, Artificial Sequence
  source: /note="Description of Artificial Sequence: Synthetic oligonucleotide"
uucaacuccuuugcaugccaggcgg

SEQ ID NO: 1835 - RNA, 25 nt, Artificial Sequence
  source: /note="Description of Artificial Sequence: Synthetic oligonucleotide"
gugauguggaucucggcuucuguga

SEQ ID NO: 1836 - RNA, 25 nt, Artificial Sequence
  source: /note="Description of Artificial Sequence: Synthetic oligonucleotide"
agccugugcugugggcagggcugag

SEQ ID NO: 1837 - RNA, 25 nt, Artificial Sequence
  source: /note="Description of Artificial Sequence: Synthetic oligonucleotide"
gcuggagccgccccucucagcccgc

SEQ ID NO: 1838 - RNA, 25 nt, Artificial Sequence
  source: /note="Description of Artificial Sequence: Synthetic oligonucleotide"
ccugccacggccuuuccuuaaaggc

SEQ ID NO: 1839 - RNA, 25 nt, Artificial Sequence
  source: /note="Description of Artificial Sequence: Synthetic oligonucleotide"
ccauccuuaaaaccagacccucaug

SEQ ID NO: 1840 - RNA, 25 nt, Artificial Sequence
  source: /note="Description of Artificial Sequence: Synthetic oligonucleotide"
ggcuaccagcaccugaaagcuuccu

SEQ ID NO: 1841 - RNA, 25 nt, Artificial Sequence
  source: /note="Description of Artificial Sequence: Synthetic oligonucleotide"
ucgacaucuguuaauaaagccguag

SEQ ID NO: 1842 - RNA, 25 nt, Artificial Sequence
  source: /note="Description of Artificial Sequence: Synthetic oligonucleotide"
ggcccuugucuaagugcaaccgccu

SEQ ID NO: 1843 - RNA, 25 nt, Artificial Sequence
  source: /note="Description of Artificial Sequence: Synthetic oligonucleotide"
uagacuuucuuucagauacaugucc

SEQ ID NO: 1844 - RNA, 25 nt, Artificial Sequence
  source: /note="Description of Artificial Sequence: Synthetic oligonucleotide"
cacauguccauuuuucagguucucu

SEQ ID NO: 1845 - RNA, 25 nt, Artificial Sequence
  source: /note="Description of Artificial Sequence: Synthetic oligonucleotide"
uaaguuggaguggagucugggaagg

SEQ ID NO: 1846 - RNA, 25 nt, Artificial Sequence
  source: /note="Description of Artificial Sequence: Synthetic oligonucleotide"
gguugugaaugaggcuucugggcua

SEQ ID NO: 1847 - RNA, 25 nt, Artificial Sequence
  source: /note="Description of Artificial Sequence: Synthetic oligonucleotide"
augggugagguuccaauggcagguu

SEQ ID NO: 1848 - RNA, 25 nt, Artificial Sequence
  source: /note="Description of Artificial Sequence: Synthetic oligonucleotide"
uagagccccucgggccaacugccau

SEQ ID NO: 1849 - RNA, 25 nt, Artificial Sequence
  source: /note="Description of Artificial Sequence: Synthetic oligonucleotide"
uccuggaaaguagagacagcagugc

SEQ ID NO: 1850 - RNA, 25 nt, Artificial Sequence
  source: /note="Description of Artificial Sequence: Synthetic oligonucleotide"
cccgcugcccagaagagaccagcaa

SEQ ID NO: 1851 - RNA, 25 nt, Artificial Sequence
  source: /note="Description of Artificial Sequence: Synthetic oligonucleotide"
agccaaacuggagcccccauugcag

SEQ ID NO: 1852 - RNA, 25 nt, Artificial Sequence
  source: /note="Description of Artificial Sequence: Synthetic oligonucleotide"
ggcugucgccauguggaaagaguaa

SEQ ID NO: 1853 - RNA, 25 nt, Artificial Sequence
  source: /note="Description of Artificial Sequence: Synthetic oligonucleotide"
acucacaauugccaauaaagucuca

SEQ ID NO: 1854 - RNA, 25 nt, Artificial Sequence
  source: /note="Description of Artificial Sequence: Synthetic oligonucleotide"
acccguuggcagagguggcggcggc

SEQ ID NO: 1855 - RNA, 25 nt, Artificial Sequence
  source: /note="Description of Artificial Sequence: Synthetic oligonucleotide"
gccuggcagcccuuucucaaggacc

SEQ ID NO: 1856 - RNA, 25 nt, Artificial Sequence
  source: /note="Description of Artificial Sequence: Synthetic oligonucleotide"
cucaaggaccaccgcaucucuacau

SEQ ID NO: 1857 - RNA, 25 nt, Artificial Sequence
  source: /note="Description of Artificial Sequence: Synthetic oligonucleotide"
accgcaucucuacauucaagaacug

SEQ ID NO: 1858 - RNA, 25 nt, Artificial Sequence
  source: /note="Description of Artificial Sequence: Synthetic oligonucleotide"
acauucaagaacuggcccuucuugg

SEQ ID NO: 1859 - RNA, 25 nt, Artificial Sequence
  source: /note="Description of Artificial Sequence: Synthetic oligonucleotide"
cauucaagaacuggcccuucuugga

SEQ ID NO: 1860 - RNA, 25 nt, Artificial Sequence
  source: /note="Description of Artificial Sequence: Synthetic oligonucleotide"
auucaagaacuggcccuucuuggag

SEQ ID NO: 1861 - RNA, 25 nt, Artificial Sequence
  source: /note="Description of Artificial Sequence: Synthetic oligonucleotide"
aacuggcccuucuuggagggcugcg

SEQ ID NO: 1862 - RNA, 25 nt, Artificial Sequence
  source: /note="Description of Artificial Sequence: Synthetic oligonucleotide"
agccagacuuggcccaguguuucuu

SEQ ID NO: 1863 - RNA, 25 nt, Artificial Sequence
  source: /note="Description of Artificial Sequence: Synthetic oligonucleotide"
cccaguguuucuucugcuucaagga

SEQ ID NO: 1864 - RNA, 25 nt, Artificial Sequence
  source: /note="Description of Artificial Sequence: Synthetic oligonucleotide"
ccaguguuucuucugcuucaaggag

SEQ ID NO: 1865 - RNA, 25 nt, Artificial Sequence
  source: /note="Description of Artificial Sequence: Synthetic oligonucleotide"
uucuucugcuucaaggagcuggaag

SEQ ID NO: 1866 - RNA, 25 nt, Artificial Sequence
  source: /note="Description of Artificial Sequence: Synthetic oligonucleotide"
aaggagcuggaaggcugggagccag

SEQ ID NO: 1867 - RNA, 25 nt, Artificial Sequence
  source: /note="Description of Artificial Sequence: Synthetic oligonucleotide"
aggagcuggaaggcugggagccaga

SEQ ID NO: 1868 - RNA, 25 nt, Artificial Sequence
  source: /note="Description of Artificial Sequence: Synthetic oligonucleotide"
aaagaauuugaggaaacugcggaga

SEQ ID NO: 1869 - RNA, 25 nt, Artificial Sequence
  source: /note="Description of Artificial Sequence: Synthetic oligonucleotide"
ccaucgagcagcuggcugccaugga

SEQ ID NO: 1870 - RNA, 25 nt, Artificial Sequence
  source: /note="Description of Artificial Sequence: Synthetic oligonucleotide"
caucgagcagcuggcugccauggau

SEQ ID NO: 1871 - RNA, 25 nt, Artificial Sequence
  source: /note="Description of Artificial Sequence: Synthetic oligonucleotide"
aucgagcagcuggcugccauggauu

SEQ ID NO: 1872 - RNA, 25 nt, Artificial Sequence
  source: /note="Description of Artificial Sequence: Synthetic oligonucleotide"
ucccuggugccaccagccuuccugu

SEQ ID NO: 1873 - RNA, 25 nt, Artificial Sequence
  source: /note="Description of Artificial Sequence: Synthetic oligonucleotide"
aguggcaccagaggugcuucugccu

SEQ ID NO: 1874 - DNA, 21 bp, Artificial Sequence
  source: /note="Description of Artificial Sequence: Synthetic oligonucleotide"
  source: /note="Description of Combined DNA/RNA Molecule: Synthetic oligonucleotide"
gcauucguccgguugcgcutt

SEQ ID NO: 1875 - RNA, 27 nt, Artificial Sequence
  source: /note="Description of Artificial Sequence: Synthetic oligonucleotide"
gccgccgccaccucugccaacgggucc

SEQ ID NO: 1876 - RNA, 27 nt, Artificial Sequence
  source: /note="Description of Artificial Sequence: Synthetic oligonucleotide"
gguccuugagaaagggcugccaggcag

SEQ ID NO: 1877 - RNA, 27 nt, Artificial Sequence
  source: /note="Description of Artificial Sequence: Synthetic oligonucleotide"
auguagagaugcggugguccuugagaa

SEQ ID NO: 1878 - RNA, 27 nt, Artificial Sequence
  source: /note="Description of Artificial Sequence: Synthetic oligonucleotide"
caguucuugaauguagagaugcggugg

SEQ ID NO: 1879 - RNA, 27 nt, Artificial Sequence
  source: /note="Description of Artificial Sequence: Synthetic oligonucleotide"
ccaagaagggccaguucuugaauguag

SEQ ID NO: 1880 - RNA, 27 nt, Artificial Sequence
  source: /note="Description of Artificial Sequence: Synthetic oligonucleotide"
uccaagaagggccaguucuugaaugua

SEQ ID NO: 1881 - RNA, 27 nt, Artificial Sequence
  source: /note="Description of Artificial Sequence: Synthetic oligonucleotide"
cuccaagaagggccaguucuugaaugu

SEQ ID NO: 1882 - RNA, 27 nt, Artificial Sequence
  source: /note="Description of Artificial Sequence: Synthetic oligonucleotide"
cgcagcccuccaagaagggccaguucu

SEQ ID NO: 1883 - RNA, 27 nt, Artificial Sequence
  source: /note="Description of Artificial Sequence: Synthetic oligonucleotide"
aagaaacacugggccaagucuggcucg

SEQ ID NO: 1884 - RNA, 27 nt, Artificial Sequence
  source: /note="Description of Artificial Sequence: Synthetic oligonucleotide"
uccuugaagcagaagaaacacugggcc

SEQ ID NO: 1885 - RNA, 27 nt, Artificial Sequence
  source: /note="Description of Artificial Sequence: Synthetic oligonucleotide"
cuccuugaagcagaagaaacacugggc

SEQ ID NO: 1886 - RNA, 27 nt, Artificial Sequence
  source: /note="Description of Artificial Sequence: Synthetic oligonucleotide"
cuuccagcuccuugaagcagaagaaac

SEQ ID NO: 1887 - RNA, 27 nt, Artificial Sequence
  source: /note="Description of Artificial Sequence: Synthetic oligonucleotide"
cuggcucccagccuuccagcuccuuga

SEQ ID NO: 1888 - RNA, 27 nt, Artificial Sequence
  source: /note="Description of Artificial Sequence: Synthetic oligonucleotide"
ucuggcucccagccuuccagcuccuug

SEQ ID NO: 1889 - RNA, 27 nt, Artificial Sequence
  source: /note="Description of Artificial Sequence: Synthetic oligonucleotide"
ucuccgcaguuuccucaaauucuuucu

SEQ ID NO: 1890 - RNA, 27 nt, Artificial Sequence
  source: /note="Description of Artificial Sequence: Synthetic oligonucleotide"
uccauggcagccagcugcucgauggca

SEQ ID NO: 1891 - RNA, 27 nt, Artificial Sequence
  source: /note="Description of Artificial Sequence: Synthetic oligonucleotide"
auccauggcagccagcugcucgauggc

SEQ ID NO: 1892 - RNA, 27 nt, Artificial Sequence
  source: /note="Description of Artificial Sequence: Synthetic oligonucleotide"
aauccauggcagccagcugcucgaugg

SEQ ID NO: 1893 - RNA, 27 nt, Artificial Sequence
  source: /note="Description of Artificial Sequence: Synthetic oligonucleotide"
acaggaaggcugguggcaccagggaau

SEQ ID NO: 1894 - RNA, 27 nt, Artificial Sequence
  source: /note="Description of Artificial Sequence: Synthetic oligonucleotide"
aggcagaagcaccucuggugccacuuu

SEQ ID NO: 1895 - DNA, 21 bp, Artificial Sequence
  source: /note="Description of Artificial Sequence: Synthetic oligonucleotide"
  source: /note="Description of Combined DNA/RNA Molecule: Synthetic oligonucleotide"
agcgcaaccggacgaaugctt

SEQ ID NO: 1896 - DNA, 21 bp, Artificial Sequence
  source: /note="Description of Artificial Sequence: Synthetic oligonucleotide"
  source: /note="Description of Combined DNA/RNA Molecule: Synthetic oligonucleotide"
ccaguguuucuucugcuuctt

SEQ ID NO: 1897 - DNA, 21 bp, Artificial Sequence
  source: /note="Description of Artificial Sequence: Synthetic oligonucleotide"
  source: /note="Description of Combined DNA/RNA Molecule: Synthetic oligonucleotide"
gaagcagaagaaacacuggtt

SEQ ID NO: 1898 - RNA, 21 nt, Artificial Sequence
  source: /note="Description of Artificial Sequence: Synthetic oligonucleotide"
ccaguguuucuucugcuucuu

SEQ ID NO: 1899 - RNA, 21 nt, Artificial Sequence
  source: /note="Description of Artificial Sequence: Synthetic oligonucleotide"
gaagcagaagaaacacugguu

SEQ ID NO: 1900 - RNA, 21 nt, Artificial Sequence
  source: /note="Description of Artificial Sequence: Synthetic oligonucleotide"
ucccguucuaguguuuccuuu

SEQ ID NO: 1901 - RNA, 21 nt, Artificial Sequence
  source: /note="Description of Artificial Sequence: Synthetic oligonucleotide"
aggaaacacuagaacgggauu

SEQ ID NO: 1902 - DNA, 25 bp, Artificial Sequence
  source: /note="Description of Artificial Sequence: Synthetic oligonucleotide"
  source: /note="Description of Combined DNA/RNA Molecule: Synthetic oligonucleotide"
ggaucuuauuucuucggagacaatg

SEQ ID NO: 1903 - RNA, 27 nt, Artificial Sequence
  source: /note="Description of Artificial Sequence: Synthetic oligonucleotide"
cauugucuccgaagaaauaagauccuu

1. An RNA molecule that down regulates the expression of a baculoviral IAP repeat-containing protein 5 gene (BIRC5) mRNA, the RNA molecules comprising a first strand that is complementary to a human BIRC5 mRNA as set forth in SEQ ID NO: 1158, 1159 or 1160, and a second strand complementary to the first strand, wherein the first strand and second strands can anneal to form a double-stranded region having from about 15 base pairs to about 40 base pairs.

2. The RNA molecule of claim 1 wherein the RNA molecule has at least one blunt end.

3. The RNA molecule of claim 1 wherein the. RNA molecule has at least one 3′-overhang.

4. The RNA molecule of claim 1 further comprising at least one acyclic nucleomonomer.

5. The RNA molecule of claim 4 wherein the acyclic nucleomonomer selected from the group consisting. of: [chemical structure] [chemical structure]
wherein,
R is selected from the group consisting of hydrogen, a methyl group, C(I-IO) alkyl, cholesterol, naturally or non-naturally occurring. amino acid, sugar, vitamin, flurophore, polyamine and fatty acid.

6. The RNA molecule of claim 5 wherein at least one acyclic nucleomonomer is linked to the blunt end of the RNA molecule.

7. The RNA molecule of claim 5 at least one acyclic nucleomonomer is in the double-stranded region of the RNA molecule.

8. The RNA molecule of claim 1 wherein the first strand is 19 to 23 nucleotides in length and is complementary to a human BIRC5 nucleic acid sequence as set forth in any one of SEQ ID NOS: 1161-1558, 1559-1873, 1874-1901.

9. The RNA molecule of claim 1 wherein the first strand is 25 to 29 nucleotides in length and is complementary to a human BIRC5 nucleic acid sequence as set forth in any one of SEQ ID NOS: 1161-1558, 1559-1873, 1874-1901.

10-11. (canceled)

12. A meroduplex ribonucleic acid (mdRNA) molecule that down regulates the expression of a baculoviral IAP repeat-containing protein 5 gene (BIRC5) mRNA, the mdRNA molecule comprising a first strand of 15 to 40 nucleotides in length that is complementary to a survivin (BIRC5) mRNA as set forth in SED ID NO: 1158, 1159 or 1160, and a second strand and a third strand that are each complementary to non-overlapping regions of the first strand, wherein the second strand and third strand can anneal with the first strand to form at least two double-stranded regions spaced apart by a nick or a gap.

13. The mdRNA molecule of claim 12 wherein the first strand is 15 to 25 nucleotides in length or 26 to 40 nucleotides in length.

14. The mdRNA molecule of claim 12 wherein the gap comprises from 1 to 10 unpaired nucleotides.

15-16. (canceled)

17. The mdRNA molecule of claim 12 wherein the mdRNA molecule comprises at least one acyclic nucleomonomer.

18. The mdRNA molecule of clan 17 wherein the at least one acyclic nucleomonomer is selected from the group consisting. of: [chemical structure] [chemical structure]
wherein,
R is selected from the group consisting of hydrogen, methyl group, C(I-IO) alkyl, cholesterol, naturally or non-naturally occurring amino acid, sugar, vitamin, flurophore, polyamine and fatty acid.

19. The mdRNA molecule of claim 18 wherein the at least one acyclic nucleomonomer is linked to the blunt end of the mdRNA molecule.

20. The mdRNA molecule of claim 18 wherein the at least one acyclic nucleomonomer is in one of the double-stranded regions of the mdRNA molecule.

21. (canceled)

22. The mdRNA molecule of claim 12 wherein the first strand is 25 to 29 nucleotides in length and is complementary to a human BIRC5 nucleic acid sequence as set forth in any one of SEQ ID NOS: 1161-1558, 1559-1873, and 1874-1901.

23. A method for reducing the expression of a human BIRC5 gene, comprising administering an RNA molecule to a cell expressing a BIRC5 gene, wherein the RNA molecule comprises at least a first strand and a second strand, the first strand is complementary to a human BIRC5 mRNA as set forth in SEQ ID NO: 1158, 1159 or 1160, the second strand is complementary to the first strand, and the first strand and second strands can anneal to form about 15 base pairs to about 40 base pairs, wherein the mdRNA molecule reduces expression of the BIRC5 gene in the cell.

24. The method according to claim 23 wherein the cell is a human cell.

25. (canceled)

26. The method according to claim 23, wherein the first strand is complementary to a human BIRCS nucleic acid sequence as set forth in any one of SEQ ID NOS: 1161-1558, 1559-1873, and 1874-1901.
